United States Patent Application Publication US 2025/0297208 A1 - sequence listing, part 15

SEQ ID NO: 3061 - DNA, 14650 bp, Xanthophyllomyces dendrorhous
ttccatatctgtattaagagttgaacgagtgagtatgtatctgcaaagagaaggagacgaaagacaagatctgatggcaacaagatcaatatgacaatactcacgaccggtgttgacttgcgatagactggacaatatagactccacctcttgcatctcaacgtcgagcgatgaagaagtttgctgaactagatcttgattacatgtcgagagttcctctaccgccttcgagacgagctatatcataacaagaacgaaccgcaacggaatcgatcaaatcagttgaattgccgaagatatatgtaaagataagcgagaaagccacataccacaggaatctgttccctaagcgccaacacatttcctctacctgctgccagagcttgttgaagaacactttctattctcttcccctcggtctctcttgtgtctcgctcttgccacacagcttcatgcctctcttctaattgagaactcaaaacctggtgttgctccagtgcgctgttgaatcgtcgagagctggcagagtcccgttcgtcaaacagatcattcacaagagacagcagttttgatcgcagtgctttggaagaggcggcgtctgcctcatacgcttgagaaagctgggataacgagacctcaaggctcttagactgtcgagtgtcaatatgagagcaaacccggaagagatgtaagtgtgaagacaaggtcaggttagatggccgatactttatggaaaccgactcacgtcttcttccatctgtcgcgcaagcagcactcgctcggcggccctggctgctctctccgcttccaggaaagtctgtacagagctatcgagcaaatcgaacgaatgtacactctctttcagtggtccatgaacctagaatcacgatatcgatcggatgaacgagtctcgatatcagtaacagattgtggtcccttctttcagatgcgtaaattcaaaatggtacttacctcccgtaacttattagacacgttttctctgatactctccacatgcgtgccgatctgacttttcaaaccgccagcccatacacggaaagatccttcaatctgggagtgtccggattgtagtttcgtggagaagacctggttctcggtcgctgatcgatcgatagttcgactaattgatgaggctgctgaggaaattttgaccgagtcctcattcaaacgtgatacttgggacgcgttagactgttgcaagagaaatgcggtcagcgcccttctgatcatgaattacatgacaggtcaacgatgcataacaagagcagttgcctacttgtagattccgctgtttgaactcttcaagcgttccagaaatcacggcattggtcttccgctgagcaacctgtagatctcccaattgagatatcatggcttgtgagcattgtgaagatttggctccgtgcgaagcgatgagcttctcattggcggacatgacagcccctctccgacctgtaggatatataaacgactcgaaaattgcgcatcagtttgtatacgtagaatgtatgcgaaaatggtttgaaggaaatattgcgttctgaatgaaaccgagcttaccgagcttgccaaagactccctccagatcacctacagctgtagtcgctaccgtttttaattctccagccacgctatctagctgtctctctccctcttcgaatttctcagcgaccttcaactcaacctccagtgctcctttcacccccataagctactcctctttctgaacgagttcgtcgacccttctgccgatctcttctctggccacaccgagttctgattcttttttcacaaacaattcgagttggtcgtcaagtctggtcttaagcgaatgaagcttcgattctagctgaatcgacttgtgaagagcttctttggcttcagtctcacggagggccttctcattctcccattctaaccactcttgctcggacttgtagactccattcttttcgcgcgaagcctggatgtatgccaacgatcagtttatagtgaaaagacagaaagaagctcaagtctgagagaacagtccgtaccatcagatcagccttaagtcgttcaatctccagcacataatctcgaatgagcgaattttttgtcatccgttggttggcttctggtcggttcatgatccttgtcgcacgcatcgcgtaatcaagtgtcgagatggtttcttctagatttgaccgagaaggtgaaatggtagcgacaatccgggtctttgttcggccaccgagggaatcttgaagtagtctggtcagcttggattctctatcgtggtgtttaaccgcaagaaaagatgttaatgtatacaccggtatttctgttttcaattcaactgatcacttgcgcgtatgggccgattgatagacagaaggatagacgaacctgtagggaacatgtctgcttttgtccactagcgcgttgatgaccctaccgagggtcaacaaactccggttgatcattcctgcctcggcagctcgatctccttcagcgcctgatctaccgacattttcggatcctgcaagatcgacaaggttgaattttccgactttgaggagctcttcgccagtggcagaagaagtttccttgagatgaacagtgatagtgaagattgagtgtgaccgactgttagatttgtcatgatggagaacattgatcggacaaaggacgagacaatgatcaatgaactgttcctatctccaaatatcaacagaagactgaatctgattaagatttgagaacactcacgaagaagctttattcattagtgtctctcctgtctctctccgttcgctaccgatctttaacaagtttagcccacccttcgcactctcaattcctctctcctccacgccttggattaatactcccttccccttttgatcgtcaaagatcttcaatccacctgtacctgctgtattggagcctcctccgaaaggtgccgcaggtgaagtgccgtgggtaaggaggtctcggatctcttcgttataaagttcgacatacgagatcttgaccgaatactctgtaaggggattcgaatccaaatagtggaagagggagtggagagtccttgggatgattccggcttcgtaagaaacagtattatctgggttgatcgccagatcaccttgcatcgtatgactgtcaacatttcaaagcacggatgtgtattcatacgtggttctcatcggttagcgcccagacgaaggactaaaatctgaacgaaaataggatttacgtttttcctgtgcccgtttgtccataggcaaagatagtacaattgtagcctgccaagacctcgtcaacggcctcttgaacaacctcacgatagacttcttcctgatctgcttccgggccaaagactttgtcgaaagaatatgttcgcttcggactagacagaatggttgatgaagaggaaatggcggtgagcagagtggatggggcagtggtctcaagaacgacagttggagcactaggcgtagtcgtaacgacgattggtgacttctcagcaatctcctttgcagaccttccacttgattgagtcgaagcgagtgtgatcgaagaggaccaaaaacaaacaaaatgagtgtaaatagtcgcgccttactcggaaagcgatcagaatatgggttgtcaaagaacgaaccggcaacgaacgacgacctcaatgttcacatctccagcttctttctctgtagcgttgactcctcgactctctactctgattctgcccgttcccgtgcccgtcttgactgttcctccgctattgatatctagcctcgaacttgttctcgaaagagtccctcctccacctccaactgtgcttccagacctggtcatcttgacaggcggtccagaaggaggatccatctttccttgcactcgttcgctcattcgagaagaggtcttttgaggctgagagggttgcacattggttgtctgacgtaggactttcggattgttgctcgtaggaatggatgtagccgagctagaagaagtgatccgcgttgtgcgacgcgccgagagagacatggctgaacttcactttaacctctcggcaagaaagacaagatatcgttaaagaccaactggacaagtaccgagtcgcgtgaggaaaactcaaagaacacggatcgaacgggcaggaatgtatggtggttgatatcgttgtctgcagatgtatggaaatcaaaaacagtcgcgtcggatgtcgcgtcgcgtgtcgcgtgtcgattgacggcttaaccctaacgcgtcacctgtcagtcatcaccattaacccaagacaccatctacagcatatataaatgggaccattgaccttgtgctcttcttctgtttctcatacatctcttcaagaaacgttcgccatgtcaagcgcatctttcacgccgtcgacaccgtcgacacctcatccaagactcatctccaaaatggctgtggtcgcttgttatacagaaggaggaaggagcataggtcatgacgcacatgacggggttgttgtcagcttgttctgcaaggtcaacataaggaagggagggtatgccagacatctgctctttcctggtaagcatctcatcaatttatatcatggtttcattcaaagagagttgaaccgatctgttaatctggaattcgatattcctatcggacagatgagaatatcacactgctctccacttcagcccaccctctggagtcacctcaaaacgcacttctactcaatccccctccaccattaccaattcaagaggccgctcaatatctcaatatacctactactatacaatcttctccttcttcatcaacatcgtctaggactttgagcagatcgcagaaagttaagattgtgatccaggatttctctgtctgcctgatcagtgagggtggaaagagtaagggagacctgcccagatcggccggccggccgatcgagagtggagcgaacgaggaaacgtctaaggcctggttaatcatgttggagtttctgatacctctcaagagtcgtcctccgttgaatcgttatgcggtcagtcctctccttgccccagatagtatttgtacccgcgtccgattgcgcatatactcatatttctgtcacttaaatctcgccggtagatttccataccacttcctcgttgtctatcaaatactctttcttttcggttgcaaggttcatcttcttcagaagaagaggccaacactgcacactccttcttgacgactcctcgtttgttaccgggcccttcatcatcgagatcaaatatcgataggctagaccgtatcctagagggaactttccaaagcaccacctctctcgaaataagatgggcgcctcaacagatgaccttcaatgaatcttctggcaacatctcgataggagcaggagcagtcaggcctgtagcgctcagaaacacacaacagaggaccatctatcacgttatgggagaggagcgaaaggacgaactgataaaagtgaaggtcgaatgggaattgacaagcacagtccattattcaggggtagagaataccgggcatttagatttctcagtcgatgcaccctctgatttcatttgggatgatcttccgttgcttcaggcaaaccgaggattgtcctcctcctcaacccttgttcctcagccgctggatgaatcccatttcacagagactggtcctcagctagaagattccttggtcatctctccaagtcctcttcattcttcccctacttcttctttgaataaactgcgtgtaccgatctcatctgtctccaagaattcactttctagaaaaggatctggagaatcttcatcccatcctagcctactgcgccaacagccaccttcctctgtagacctaggtgatcgcgtggacgcgtcattctctgcattcgatacttctctaagaccctctccgtcaagttctcctatagtcaaacatcaatctccgcttggaaattcgccatcactccatccatctgcgccagcagaattaccaagcggacatcaagccaaggtgttcagattaaacctagatatttcgcaaatccacgtatcacgcgaacctttcgtagtcaatgtatctggaacggtccttttgaaaccatcaacaacgggagaagttgcgctgccagagtttgcaatcgaagtggactggttaggttctgaagcggatctgagagcgagagagtggttgatccaagcgcccaaacaagtcaaagtgtacccgccgtctatagtagaaagactgcctgatcaaagggagggtaaggcttggggggtatcttctttggtagatctcgaaacttcttactctttcgtcgttggtcttcctgtttcaacatctgaagccgatctatcaacagtttctgctactatgtcgccagctagagctattcggagaaaaagttctttgttcgttcgtcaaccttctcctcccttagaaatttacgcctctacttctctggctgctcagctttcctcgagtgaatctctcgttcctttcactggatcaagatcgatcctctctgtctatatggatacgtttctttccatcgactctgcccagaagggcgaacccaagttgtggaatcaactttctaggatgaaagtctcgttgtctccatctaatccttcaacgtctttacacgaagaagacgcattttttgaattcggcatcatcgccggaccttccgtctcgtccgttacttctactcctgcgctcaacacagtgccttttgttcaaatcgtttccattcacgttgatggagtctcgttacctttcactcttcagaaagatccggcactcgacccaggttcagatattgttgctggcgctttaggctacataagagttggattagatgacgagacaagggaagtaggaggacagctggaggtgctttatactgtgtctggactgaggagttcaatagatgggcttcgatcccagaaaaaaggtagtccattgaactgggataggagatcgaacaaggcaacagcgggtgaagggttccaactcgggttaccaagctttgaaaacgaggtcaaatgggaagaaatcacggtccatgtgatagatggtcagttttattttgaattcttgtctctctgagttcttcaccttgctcaagcttcatttatttctacgttataggatacttcctctcaattgacgcgaaatcttcatctccatccttcgttaacactacatcgaagagtgtagtccgttcagtcacgcactcccttccagctttagcgacaccacatctttccgttatgcctctcactagtcccccacttgcatcaaagtcgaatccgacccctgcatctttatcctggtcaagattacctttccttctcctgacgttctggcttttgttttccattggatcagagatcagagcactacgatcgggcatgatcgagatggcagtagagatgagaggaaagaacgagatgattcaacgggcattggaacgatgtgagacagggtaccagcgacccatatcagcttggcaggctccttttgttcctccatcgacatcaccgttgccgctatcttcaccagaacgtttgtctgctgtttcagttacgcgcgcggtttcatcgttcgcgacgtcgggttctgcttctgcttctgcttctgcttctccttcgtctctgtccgatactacgtctgccacaccttttgatatctcctcatcaatcgcctatcgttctcgttcaccctccaccacccaagactacattcatacgcgctccagtgcagaacattctcctcttcgacctaacttcgttcacgtccctatcttccaacctcctcttccgagctcgactcacggctctggcagcctctctccgacatcgtcctacagtttcacaacactcgaccagtttctatcatacacaaagcagctgattaaccaggatgctttcagtcggagactgacagctttgaggcaattagtggggtgggtgctatcaagaatcacgggggagtgatgaatcgacagcccttcacttgctcaattttccatttacatttctaccaaggtatggctaagattgaaaatcaatgcatgttatagtgttctgtctatgcgaatgcgagtgtgtaacgaaaaggagatcgtttatcaagcgagcgagactgaatgaagtaaaggagacagcttagtgccatcaagaatcagatgtcgaggcaaagagtgagacgggcaagaatcagtcatgataattcggcccggtaccgagtccgactgtttttctctgattcgacgatttgtccatcgtgcgcatcaacatcttaccactaccaccatcatcctcaccatcgccatcgccatcgccatcaactatcactcagcgctcttggacccgccgttcttcatctcagaatatacgaatagctgtcaaattagacctagcaggccatctggatgtcggccttcaagctagttatccctatggaaatatgggccgatgtcttgttcttcggagtaggacccccagcacaggagaaagcgatggcggagcatgggaggcgagaacttcgagatcgacgaaagatagtcgttcaggtctgtagaggctggaaggtgtgtgcgatggaaccttctttgtttcagctctgagcgaaaggttcaatgttctgacccctctcttttatctgtcatatcctatagaaggcagcatggaagtacttgttcatagacccttacctccccacacctcaatctctacaccagttcacatctattcttgtttccgccgacaaaaagtgggatgatcttcgacattctccccattctcttccaggtgcttatgttcgaacactcgatctttcccacctctgttacgaagccaaacctgtctctgcatcctcttcctcctctgtctctcgtttggcggatatcgttcatcgaccgtggatgcaaagtcaactgctttgtcaactaattccacttgttccatccgtcgaaactcttgtcttaccttctggagaaggaggtctgatgctttcaagaggaatattccttcgagcgttgaaggagagcgagcttagctcgaacctcaaacggctgaaaggcttaggaatgcttatgaatggagtcattgatggaagaggggtagacccacttgtttcccttctagagggcctcccagctctggaagaacttagtgttgtaggaggtggaggagtggatatgccgccgtcagacgaattcatagaaaacaatccacagccaatgctctacttgaagaacctacaacatctctctctaatcggcattcggtcaagtctattactccaggcgctcattgattcggatctacctgagttaacttccctgcacctcacatcgtatcattcgacagagtgggacttgacgacgcctcttctccagaagcacggatggaagttaaagtcattgacgtttatccatcttccagatttcccccagccagccttgccttttccggaaaatactctcttaatatgcccttcgttagagagccttcagtttgaaactttcccacataacacaccaccttcactctcgttctttgatccgattccacctcctgttcctgctgagacctccgttcgtccagctccgcccccacctccctccaagctccgacatgtcatccttccgcgacctccgaactcaaaacctgcgaccgaaggctacaaacgtctcatgtccgacttgtcccatccgtcggttcttccctcgttatccagcctgacattcacaaagttcaactgggtccacagtcccaatggaggtagcggaggagcatcgagcgcaggaacgaacggaataatcagagaatgggctatcatgttaggtaaaagaggagtggtcgtgcttgatgggaaaaacaaaccatgtccagacttggccgaagtaggaggcaaatggttacttgccgagttggtcaagagacgaacggtcagtgctctggttggtagggagaggaggagaagaagcgtcagaagttgggatgattccgagcagagcgaggatggagggtaaaatcatgtatgtacttttgtaaacgtaaagaacctggaagttgtaattttcccttgttgtcagccgtctctctttcgacttaatatcgttcccagtcatcagaccctatatatcccctctcctctcttctttgatcaactaaaagttgtactgcttgttttttcatatgatggtttctgtatcttgtccggcttattttcatctggatcttatggctctattctctctgaaaaagcgtcaagctttcttctgcacacattcttagaaagaagatatataaagtaatacaatattccatagctaagcattcgatcaccactctcctctacgtttttcaccctccaaaaccctcagccgatcccacgccgcgtctccatcaacataacaccctttcaaccatctctgcggcccatctctcaggccactgtcctcgatctccttgaatccccttcgagcatgcagtacccgtctgttgtcaaacactacacattcgccttctttaagtgtaagctcgaaaaccaacttgggatctctcaattctttcgcaaacgccttcaaggcatccatcgctacctccgaggagttcggatcaggaggaaaaggagcttggaatggcggtgaataattgacgtgcttgatctccctctgaacatcaagagtcccattatgaacaatacgtgtgggaggaggatagagttcgatgatggggtgagagtgctcaagatgatgcgcgtcgttgatataatgataaggtaccttagccatcgtcagttttcggaagacgtcgggtttgcgctgtcgaaggtcttcagctgcacggaaggaatcaacaaaataggacgctccgcctttcgctcgagctcgaagagaatgaagaaattgaagctgcggagggttttgaaagtacctaggagaggaaaaggtatgcgtttgctgtcagtttgactcgtgtaagaaagtctgagtagaagtgagaaaaacatctcacaagagatccatgtgaagtcccaatggaacgtctgtataagctacgttccttcctcgatcgcctagcgatctgacgtcccacgtctgtccgtagaacgtatgcctgagctctcctatacgattggccagcgctcgaagctcacacgtatcgttctctgtctgatctgtaggtacgtctcgtataaaagcaatcccatgggtagctagctgtcgaagtacagtatggagtgctcgaggtgtaaacttaaaatcctcgtaagacgtccagagcgtctggaggtcttttaaatccgacgctacccacgggattgatttcggtaccaacggtgcttcttctttggtgcgcgagaggaagaccaaaggaatcaaagagtatatatttgccccgaccatccttctagcaagtgccttggcggactgtgagttctttcgaagaccggtgccctcccaccgaaacttcaggcaaggtcctagttcagcagccacggtctcacccatcgctttcagttccgaaacgtttaccactgtgatcggacgcttggtcgaatcttcgtcgatcaatcggatggtaggatctggctcgtcactctggtgtttcttttgtcgagttgaagcatcaacagaatataacgagacatcagaatctcgaacccatcgggccgagaacgtctttcggtcgatgcctagagatggacatgttagagtgaatgttgtgctgggagtatcgatcttctttcccgatgaagcgcgagaaggagagagaaaaggttgagaaaaaacggtaattgttgattgaggatcgattaattggtaagaggtaccttcgaggcagcatatagactggtgtcaacaatagaataccggagaagatgatcaaggagagacaggagagagcaagactgactactggaggacagccgatcagaagatctttgagagataccaggcggagctacacttgttttaggaggagaaggtcttggtcttgagagcggtgtacgagatgatctcgattcatagaatgtacggtccgaggacggaggactcgacttgttgggcggccgttggttcaagaagctagacagactttctgagcgaacgtgttgtttctcttccggacataagagagtcagcgttggtgagagatgtctacggaaaggaacctgaacaaaaggagagcttactcatgatcgagtccgccaggctgagcccagaaggtatagatggtcctctgtgaggtgtcacacctgggttgccctgagtcgaatcataagagatttcagcagctgccgtggaaaactcctttagtatgaagacgaaaggccgacagattcctgaaggaagaactgattttggtattgaaagcttggacttgggtaaatatataggatgcatggttgacgagtgatggtgatggatggttgcttgggtgtcggagatttcaaggtagatggagatcaaggtgtgttcggcggtcggtccgttcgtcagccggtgtaaccggacgaaacctttcaattggattccttctaattagtcgaaattcacattgcaatacctgatgctcgttcttcatctggcatcgttttctcagtccacctgctctagctctttaacacagcctgcttgaccatgttaattcattagactgttcattttatagtcgtttcttttcacgtagcatccaggcaattccatagactgcgccactataggcgatcagaattcccacggcctgtacattagtcatttccagactattaattgacaagttagtcaggccggtcaacagatttgcctgtagaagaacataggggggagcaatccgagttaagggatgaagaaacgagatttaggaaagcaaactcggtgggtcacatacaatcaggaagacaagctgagcgttcgtgttaccagcagccaacagaagcggcacactcgcacctcgattcgacacaatctctctggaagattcaattgtagttggctcgaacgctagttgaatcgcaaggtaacctaagagaaatgtagtgttgaacgctgtaatccatagaacgtatggcagatttgcctgtaaattaaagtaaaccgaaaaatagcgtgttagtcgaacagggcagactagataaagaataacactacgagaaacgacaagagattcttaccagtcgccggctaacctgaacgccccagccatctactccacaacccattgtgatccagagaagcgtccaccataccgccgacagaccaacaagcacgggtacgagagacccaggtttagatatcgtttttgacgtgggacgacgtaaactgtaggcaaatcttgccgagggaggtaggatgtattgtccgagatcgagaccgagaagatagagagcgagatagcctgggaaggaaacgatgccctctttgttcatcgtcaagaggttggttcgtggactgttgatcgcccattgctcgagtccgtagaaggagagcaacgcctgatggactatcgtcgagtgaaaagagagaaagtagaagggtagagagagagagatcaatagatggacgaagaagagtaaagataagaaagcagacgagcgcggagggaaaagcgtatttaccaagggtaaggatgattccgaaagccgaaaagttgaggtatcgggtgagcggatagatgagtacgccaaatggagggacgagtcccatagtaaagaaaaagttccaatgaacgccgtactctgtgacgtgctcctgtgtaccgaaggaagaacccaagaaagaaaaaatcgagtgagaagaacgtagaccaaaaccaactaagtccgatggagcgttgtcacatacagggtatttagcaccttttaccatagccacccttacaagccccattacgactgtccatgcgttttttctaatggacgtcagtacagcaggaatgatgctaattggtcgagtcgacgacgatgccggccgaagaaatggtctagccgagatgatccccaaagacatgacaaaagaaccaacaccgacgtccatctagagattgttcacacagcccatcgaataagagccgacaagatgaaagaagttagttctgcaactagcgcatacacataacacacgctagaaaacgacggcagagattaggaagaggaaacgaacgaccgaggtgccaaacaactctgtcttcccaaactctcttgggaagatattgaagtctacagcgaggatagaaagcacagtgatgaccatcatatgtgcccgataaaccgtcaggaaggactgtgtcggcgagcgcggttccaccgcctcaattttcaccttggtctcattggaattttgtttgagcgaactcttcttccgagggctcctgccgagaggtttatccatggtggctcgtttgacggctcgcttgagcgtatccatatctggagggtcctgtatctcatcctctaatttttctacaaggacatactcttgacctgtgtcttttccgtctactctctcttcctcttcatctttctcgtccacctcaatctcatcttcatcctcgtcctcatccgctgccaagaacctccttctccttaatccctcatctctctc

SEQ ID NO: 3062 - DNA, 6008 bp, Xanthophyllomyces dendrorhous
tctctagactgaccggcttcaggctattcatgcctccagtaacaacgggaaccgcccaggatgcaatagccagcccaacgagagagcctacaaacgaccaaggttcgccagagtagatggtgagcgccaagagaagtggaagaacggatgtcgcgtattcaaacagaaatcttccgacagccgagaacgttggtgttgacgtgaatgttgatgttggcaccgatgaggatattgatgggaatgacgagttgaacttatggtacaagcaagagtaaaggagataagatgcctatggacaatcaaaatatcagccctcaatcagtcaaactttccaccgtgagagccattaatgttgtctctgcagaaagaaaaagatgaagagaacagaagcaaaggccaaaagagaaaaggaatttaagaaaggaagagagcatactgacgagtccaacacctgtaacagcgttgatcgtccctatagatgaccctgttccacccgagacaaaagactccttggcgtctttaaacgacatggtctttctaaatgcaagagagaagaagatgtccctcttccttttctcttcagtgtttcctctagctgtttggtctcgtcgtggtgtgttatgtgatgaatgtaatggatgatgacttaactcccaagtaatgttttcttgctggctgagattagataagcaaaaattactggtagacacagtgtatgagaatctctttatgattgtcatctttggatagatttcatatataacacacaaccgaccatcccatcaagaaagaggacatggagcaggaggacatgaagcaagaggacatgaagcaaaagcactatatgaaaggactacatagaaagtttgcaggtatgttgacctcgaccaatacctaaatatcgacctctgaccaaagtctcggtcggatccaaatctctaacggtcgcctgaggactgcctctttccacatcaaatcttgtgggtccgataatgaatcgggaagagaatcgaggaaatatcggtgtgaaagcatgaggatgaacatcttaagttcaagcacctggtttgcaaggaggccagcgagcgaacaatttcaagcgtgatagaggataaggcacgaacatagatcagacaagaaagatcaagccgagaatagagagacatgaggaattcactaagaaaaagaaaatccaagacgaaagtaaagggacatacagcgagcttctgtccgaaacaagctcttggtccagcgccaaatggcatacttggccccgcgttcggatcaaacttcccattcgaatctatccaacgttccggactgaaatcaatagaggtaacgaagagaaacagaaaaggaggaaacagacaggtcgttaatcgaatttgataattcaagaaatgggagaacggtgatagagtcaaggaccatctagacaaaggccgaaatacatacacaaacgaagccaaattgccgtcgtcgctccatcgaaacctgctgtttttcttcgaagtcgagctcttctcctcatcgtcaacctccgtatcggtgagcgtgtcaagatcgatcaatgtgtttgatttggtagcctctcccgccatgccgagcataaggagaatctcggtgttcttcggaacaacctgtccataaatgaccgtttcttccgagtctgtttcgtgattcacagaatgagatgccacatcaaacgatttttacctcatactgaagtcagaaggagaaaaaataagtgacttggatgacaaagttccaaggaaaagacgaactagtccgagcggttgtcatggttgtcttcgccacgcgcaaaacttcttgaactattgcgtctaaatctgaatatctcatacacacacgtatacagccacgatcagttagtgcgtgaaaccttattaaaatgatgtgaggagagaagaatgagtaagaaagactaagacccacagggagctttgcccgagttgatgtcctcatactgagcttctcgttcctctagctccggcagagcatccttaatatccttatgaagcttgcgctgaatatgtggattttgagtgaggaaccttatagcccagccaattgaagacgagactgattcatcaccctttaagtgatagaacagcgccaaaaagagcggagttaaaagcaaaaaagggccaatcgttaagcaatcaagacgaacagttgaacccgctaggaagaaagaggaacgtacagcgaatagtaaagtggccatttcatctctgatctcctctactgtcatcatcgcttttttaccctgttcttgctcgaattcgtattctttcgcgagcaccatatcaagcagacatccctggttcctctctgatgctaccgatgaagcgactgagcggatagtctgtcttccttcgatgatagcttgattgagtaccttatggatgagacgctccgccttactgaaggaagtaaatgggagtcgtttgaggaagtaagagaatcgagggaaatttgattcgataggaagtgactagggacgaagagagagatcgaggaggtgtttcagatgactgtgagacctccagattacaaagtcaagaggaacactgaaacgtacgttgacatatagcgagcttgcccagccgagctggcttctttctataggaaattcattgacaccagatttgcctttcgacttgacgactgctatagtagattccaattgatggtatcccttgccgaacgcgactttggagattatatccttggatgagtttcaagaatgattgaaaaaaatccgatacacaatgtgtgacaagaagtgtgagcaaaggcgaccgcatccgtgaactcatgagaagaaaaggagaccagttttgatatctcacgctagctaacagactgatatctggcatgatctcgaaacagccttcttccactggtcgtgcggtcggttcccccagcatctgacgtttcatttcccatcttgaaatgaagttatcagtaaagatgaggaatttatcaactgcgtgatacacgtttttacaagtctaagaggatggagcttaaaagaagaaggcgcatacaggatgaataatttttcagcggttcgcaccatcccgggcgatagatgtttcaagttttttgggctcatcaccggtccgattattcgtcggtgatgcttcggttatgaatgcgtttgattttatttcattttttgaatatagaccaaggatgtttgagtcagttaagatagaaagcggagatctcgttgtggttggaggaatcttaaagacctactctccatgttgcatctgtgaacaatcagaatacaatacacggcaataagaaagtgatcggattttcagattcagcatcccaaaacaagattcatacttgtctgcaaagaaaaggatccccctttttagtcagaagaattgtgaatgatctcgggtcagcgtcgttgtctggctcatctgatcagcagaatcggaaagagaagaaaggggcaatcagccttacccggtatgataggaatgaaaacgttaacgaatgagtcggaacgtctaaacaacggatccttcttcataactgttctcggacacagacgtcaaactagacggctttggtgatgatgaagagagaatgaaacctccgctcactatcttcgatcaggaacggatcgcagacaaccaatgtgggctcccaggcgacaaagttgaattgataaaagcctggagaaaacagcgagaaaggatcaatatgaatatcagtatcgaatgaaattcgagatatttgtgacttgtaacacaaaagagcttggggaagacaaataagacatgcctcctgggaacttttcactaagttcagcgtaataaggatggaatcttttggtccgtttgtagtacttgagcatgggtcttaagtctccgaaaagccattcggttgattctagatggggaatgccagggatccgtttgatggctaatctgcggtatagagcgtatgctgagctggctacaagcaaaacgagacccaagatccagagcattgcaacggtagagataggtaattgcgatgaatcgaattcaaacagataaagacaaagagaagacttgtcgagacgatcaaggtcaatcatcagaacggaaagagactgagacggatgagattgaagcaatccttatacagaatgtcaaccatatcaattagcgatgcaggatgaatctcggatgagtgtcagtaaagcagagataaggtcagtacgatagattgttcggggcactattctattcagtgcagatgtatcaatatggctgcatgagagcaatctgaaccgatggtggttgatacatggccctgctggacccgggtgtcctcgggccactaacccaccaaaaactcatggctcatgagcatagtttgcctccaccgatgtgacagttccggtcctagcgtcttcctcagcatcagtggtagtcgtattaaacaccagcattttcgctcccttgtttttgtcctagtgaagggctaggtccaacatgttgcgcgacaaattgtcttccctgttccatcaagccagagatactaaccgaaaggtggtggttacacagaagaacaatcacacaaggaacacaatgacatcacacttacattgcaggttacatctcaactcacatttcaccccgacgagacaccagcatgctatccaccgatgttgtggccctaattacataattgccggaccgacccctttcggaccccttgtgctgcgcgactaaataaagaaacgattgccaagacgtgcctagtgatatttcccctcgtctatctgtgccatctgccagagcgagttgacaaagcttgtaggtcgtcgctctttttgtccttcttttcttttttttcctcttccttcttcttctcttcttgcgtgccttctctgttgtcacacattccttcgttcattcattcatactctttcttcgctcgggtagttgagaaagcagtaaaggaacagttcgactcacgctcgtacatcacctcacacacaattcatgtcctacgccttctcccacccggggaacgcaatctcaagcgactatccggttagacgatccagccctcctccgttctcgtcctcgtccaaccaacaaacaccgatgtcatcggcaaatccgtccatggtgcaccagccgttctacagcctcaacgacggcgacaacacccctggccagtccatggttggactcattccagagtctcacaggacagagaccctgatggataacagaccgtaccaaactaacggctactcacctgccagtccagctagctcggattttcagctcggatctcccaccggttatcctcaggtactgttgcctttttctttcttcttcttcactcatgatttgttgacatcatgtgctttcctgcctgtcaaaacacgcacatgcatacctagggctcgatctcgagcttcaggagcatgcagagtagcgtgttgaacacgcctctttctggaaagccaacgatatcagaaaaggttagtctgatttcaaacaccgaagactgatgcgttcctttgactagactcacttcttgtttcttcgttcttcattatcatcagtatactctcccagcagatcctgccctctgggcccgatcagacagtcctgaaccagatggtatgttgttctttgctcttggttcgattgttcacagtcgccttggacctttatctccaatcgtcaaaaacagggaaacaacagaatacttactcttcactccccctcgccttaaaagactatctccataatcccgacccaaagcgagaccataagaacgataacgccggcactatcttaacggttcgagggctttggaatctgggctgtttgctcatcctgggagcgtctttaacgatggtcagtccactactggtctattgtggagctctctagttacgagacgtatagaagccgtttcttggaacacatatttaacatatacacatgtcc

SEQ ID NO: 3063 - DNA, 1417 bp, Xanthophyllomyces dendrorhous
cacatgtcctctgtgggtcactgtcctccataattcgtcgtttgtcatttggttttggccatcacagcttttgtaagtattgttccttctcacatccattatagacacatcgatccatttgactcaacggcaatctccttccttcttcttatggcagcgctggctaccctcttgtgacagcattcacaaagagcgacggaaccacccttggagctttcaagtcagtgcattcttttttggctttcctttttttggtggcgcatcgtttgtcgttcgtcgctcaacagttttattgaaccacatgttctgtacctttcctttcagccttggaggagtgaatggttcaggtaagagaacggcttcacttattctgttcgaatgattgtgatggctcaaaattcgctcctgttgaaacaatcgatcaggtcaagtcccgcagactatcggaagtacgtcgaagcccctatctggacatctctcttctcattcaatcatcttgtttctataagcttacctacaaagtcgccatttgttctcttctcctatcggtcattagatttcggactaattgataaagacaccccgaaagacgcctatactattaagtccaactcaggagaaacttgggagcttcagttctcagatgagtttaacgaagacggaagatccttctgggccggtgacgatcccttctgggaggcacttgtgcgcagctttcttcctactcctcatgtttgcaagcatcgactgacaccgaaaccggccaaatcatttaggatcttcacgcttggtcgacaaatgatttagaatactacgatccgagaatggtcactactaccaacggaacgctcgaacttacattgaccacggtggatgatccaagtttaaaccatggtttgaactatactggagcttccattcagagttggaagtatgctaatttactgtctaatttttacgtcatccgtcttttgtttgtcggccaacctgactaacaatgggcttgttactcaattagcaaattttgcttccaagggggccgattagaggcaaaagttagactgcctggaaaagcttcgatctatggactttgggtgagtttgttttatctcaatttatgttgtagcgggtttgatcctcgtttgctgatagatgattctcgcttggttcgtttgttttagcccgctttttgggtaagctagataacgttatctttgtaaagaggattcgaggatggaatgcttaatcatcttgcatttgtgaccaattttccaagacaatgggcaacttgggtcgagttggctatggagggtgagtctttttatcggacggtgctgcttttccggatctttgttggagaacgatttcttatcacagcaatatgcccttgctgcgaactctttaatcgattcagaac

SEQ ID NO: 3064 - DNA, 11094 bp, Xanthophyllomyces dendrorhous
attcagaacgctcgagggaatgtggccatacacttacaacacttgcgagtaagtgtcgtttgtatcatcgaaattacctatgctttagatctagtatcttactagcgagtttcttcttcctttctcattacctttcttttctagtgttggaacgctcaaaaatcagacgctcaatggtttaccctcactcgccatgacatccggaacggactcgagcacagataatgtgctctcgtatcttcctggacagagactgtctcggtgtacctgcccgaatgataagactcatcctggacccaaaaactcagatggaacgtggatggggagatccgcgcccgaggtcagtcaatcattcatacaaacatcttctgtcatcgtcgtatcattcgttgactgatcaatcttaatcatggttcgcttcagatcgatgtgtttgaggtatgtgtgctcgctttcaagtagagcctcaaacgtcgcatctagctgatatcgcgtttctgctcactcctgccattgcaggctcaaacctcgtcagttacgcaaaaaggttcgcatggcctatatctctataattgactgattttttttcacagtttcgaggctgattcatctcattatacggctcttcaggcgcggtctctcagtccgctcaatgggctccgttcaaccctgtacgctttctctatcaatcttctcttccaatcccttgttctgtcatgttgaattggctttcccgtcgaggggggttttcttatctgtagcactatatctgggataatgcgacctatgcagagattacagatccaacaattaccgagttgaacacgtaccgaggaggaagttagttctctttcaactcttcttcggagactcacgctcgctggtgaaacctgaattcaaactgacgctattggcattcttatctgactactaccttttatctaatcagctatgcaagagacgtcatctggagtgtcgaccactgaccagaactgctaccagttaaccaaggatggacaaccgggctgctacactgtatatgcgttcgagtagtacgtacaatactacataagttctgggcagtcttcttaatcatactcgagcttgaccttcatacactggtatctctatctcttagcaaaacgggagacgacggatatatctcgtggttcaacgatgacaaactgtacgttttagtcttgtatcttcgtgagtgaagttggacttgagtgattgctgagctttgaggtttcaatgtcaatattctctctcgcctcttctcagagcttggacatacaaggagggtggatttgcagccaatgcagatttaggtattggtaaccggccgattccttacgagccgatggtcagtccaatttctaatcttttttggtctgacttggcgccttccgaataatcgaatcaaaatgattagtagttgatctcctctctgctttgccctcgatttccttttgattaacgtgtctttggacattagtatatcctgtttaatttggccatgtcttacaacttcggaggcattgacctcgatggtttggcagtaagtattttctaaatttttctcgtcacgaaaaaaaaagctgtacatgctcaacggatctcgtttgcttgctcgttccataggaaatctggccggtcaagatgaatgttgattacgtgagggtttatcgtgagtgtattttctctaatatctgcatctgccactgatgtgaagtgactgataagagctaagtgtatactgatcactacattcatcttgtctgtctgcttatgtgaatgtagaggacccaaaccgaaaggcaatcggctgtgacccggatgacgcgccgacgtcaaagtacattgcactctatgactatgcattcacgaatgagaacatgacgactgtaagttactttctcctcatcactcaccctgtgggtcgttccaagcggcctgtcggtcgtctgtctgagagaattagagatttcgggcttctgacaatttgttcttcatgtctttcttgactgaaacagtgggaccaggtatgttgaaccccgcgtctacacattgtcttgtttctgaccgagttgctgatcctttctgtttgttcgtcgtattctttcgtcagatgaccaacaacgcttctaagcctggtaacagtctacttgtgagttttccttgccggcttcgcacagaagttgaagctcgagtatcgtgaagctgaacgcattctctgctaccctttttgttggcccccttacagggcgaatgctaaacaagagacttttgcctttcagaagttgcatagcatgcttcttcacttctttccatcccagtacattgcatctttctttcatgtctattatttcttttctctgttatcgatcaaatttgtttgctctttagaaacctcctttcatacccgtttagagtttctatcggttcatcctcactttgtctttttattcatcgtcgtatcattccttcctcttttcttgaccccttccttatatcttcttcctctgcttgcccatcatcagtgtatgagcgcacttggactacttcatctttacttgcccccgcccctctttttctctctttccatcctgttcatcacactcttactttctctttcaccgtttttaaccttccatcgtgaaacacagctgagccgatcggtcagtcgatcaatttgttcatattcgaatgtggacatgtgtaggtagaacacgattggcgctgctggccatgatctttgtctgaaagttcgacttgactgttctgaaatcttcatttcatctccctccaaaaccatacctattctttaccttattcctcttttttttccccatcgtggttgacctgaccagacatttctatgcatgtattacggcaattttgctagatttgctgtatttccaacttggatatggaacagacgtcccaggcttctgactaaagaaagacaaacaacaaaccggcaagaagaaagacgaggggatggaaggatctagaacgggaaggatgtgagagtagtctaggtctaaaggtgagtcatcgtttctaaccctccgatcatctacctgtgttccaccagaaattccaggctcgctcttgatccagctatttcaatcagacatcaaatactctgtcacatctaaaccaattcagtataccgactgctcttggacgagtataagccttttcgtattcctggacaggtctggattgtgttttatcccttttgatgattagtccggatatccggcgtccacgttcacgttcgcgtccacgtctctcttgatgcacttaatacgatcgacggaaatgacaacatccacaaccccttccaatccgccttctcgtccggattctccggtaggttcggagtcaattccagactcgaattcaaagccagaaattcagccgccggccaggaacaagaagacgagaacgaggacgggctgtctcgtatgtaggaaacgcaagagcaaatgtggggaagaaaaaccaagttgtcaccgatgcatgagagccgggatggaatgcgtttggccggtaatcacaagcaggttaacagcttcccaagcttgggtcaaggttgttccggaaggaggcaacggcggcagcggcagtggcagtctgactgaggaaagcccagagtgttcggcgttgacagttgtctcgccggagaagcaacaccctctcattgaacggttgcacggtcgggacggtgcttgggatgaacaaaacaagggagcagagagagacagggatgaggatgggcatatgttgttgattgctcctacgtctgagctggagttgaattatccagattcaaacgaacgatttctcgttagttgacatttcttttaaatattcatatcttttttcaaggcgacgtgttctcaagtggctgtcctgtgttctataatcttatgggaacgaccagctccgacatgcactgaatgcggtaaagtcatggccgtcattcatggccatcactcctgacccgaaggttggcaagtttagcccaatcgaactctgtatgcctttcctcgacatacaacattttctcagtattcctcgaggatcatcgaccgcaacggatgccgtttcgctttccttgttgtcaatagccgctgttcatctttcttatcttcatcacgtttcctccgtcgaagctttgttgaatcaagattcgtctggtgggcagatcagcttggcagaaacagagaggtatgccaatatgggtgatgctttagtcaccggttcactcgccctggcagagagtttcatgaacattcaacaaatcaagggattgtcgtcgatatcagggaccggatcaaaaatcgatgcagagacggggatggacatgttgttggccgcttgtttgaacaacatactttcgagatgtcttgccggcggaaatggaggaagagaatttttgaaccttgcaggtcggatcatcagaatgagaggtggaccgaagaacatgctggacgcggctatcaagatcagaggcgggacgaggaagtcattcagaaggaaaaaagccttgatcgaaagtatctggtcgtgggaactttgtagtacgctcatcctccttctcctcacaacgttcgcgctacagtgcgagcctcgttgttgatatagatcaaaacgctgatatcaaaaaaaaaatatccatgtactcaggctcaatttcagcaggaagagtacccgattcatattcagatacccttcaatcttggatcttcaatcccgaaccgggacctatcaacggtatggagatggacgaaggcgagtgggacattctagaatgtatcatgggcttgagtcgtagtcttctagagctgttatccagagtaagctcttttcttctttccttgttcacttcttcttgcgatacttcaaacctcccgaatcctgatcaatttggtaccaatgtcaaggtgaattcactctacgctcattctcacccactgacatcaatccctggaaagccgattcaacgcccggtggagattgatctattttggaaaatccaagcatggaagctgctcgttgaactcgacatccgtgcaaaagacatcagtcatcaattcggacataaaagacctcaggactcggatatgggacgactggaattaggaaacattatctggattcgaacaacggaggtttgtctcatttccgatatccaagttggacttacaaccctttgagctttgactgacggctttcctctttcattatcgatgattttggtagatgattttgaagatggacttactagctgtccatccatcagacccagaaactcttttcagagcgcgagacatcatcgaccttgtcaactactgtcatagtaagaaatttgtgatgttgttgtacgttttttcacttacttcgtctctatttcaggtttctctcaattctgagaaggtattcaccctcccgatcttgcactatctattggcgttatcgtcagattattatggccgatcattgtcgctggttcagtcttccaagaaacaaaggacagagatcaagccttgacggctttaaggtctctcaggtatgttgctttcttctttcccaattttatacaccgtctaatctttttttttgtcctccattctgtcttggtttggatgcgaatgctcgtagatctgtatgctgcttcgatctagattctgggtttgccatcatacatcaggttagctcatcaatatccgtatacacgtctttctgaggagaagatttgttgtgttccgttgctgatgcaaatgtatttatatgtaggtctgggatgctagagacaatggcaatgaatgggcttcatggagagatgttgctattggctctggagatggatttattattggctgatcaggtcttcttctctggttgtactttggtactgttctgctccaataataagaaaattttggctgtgtaatatgttcacttcgaattatagatatatatgtgattgactacgtggactcaagtatattgggtggctacttcttcaagatctccacaagcaaatacatcgatatatccggttacgcatatgcctctatcctgtgctcttggacatggctgaagcgaatactgctccccgtctgtattttgcgctaatcaataagcagatcttcccaatctcgtacccagcagtcgatcagattgatgatactttcttcctcctcctcctcctcatatttccccgattcaacccacttctcagtccattcctccatttcctctatccacatactgacgtcttcaatggacccaaatctcgattgaagatgttcgatccagtcttttttcgatagtatctgaaaagaaggatacatcgaactcttcagcttatccaacaaggtgccccatctgatgaacttcatttttggaatgcccaaactagatgcttgagcatccagctcctcttcaggaacaacaaagaagatccggtcaacaattgaggttgctgcttggtctaatgccatccagggaatccggatgaagaggggaatgtcaggcaaggatcgagttatgaagcctgctttaaggattcttcctaaaacgttcgaatgagaccatataccgtgttgaacacgtggaagcagaggagggatagggtgaatggtactgtgtagagagtggtggcttgatatagtttggacgatgcgcgagattatgttcagattaacatcaagttacactcaagtactaaaaccggaaaagaaccataaacaggaaggataaaggatagataggattgactcacctcaatcaatggttcacttcggaaatccggaatcgtttctcgatgttcagacatagcacaagatggactgggtacagaacctggaggctcaatgaagtcgcaggggccatgcctaggactgatgaaatgaaaattcttctgcctccttgccagaccgattttgcataacagaagtgtcactgtttgatttcgtgatatttttgattttgttggaagaaggatgttcaattttaaagaaatgtatgtgtgtttcaacaagcaagtctctttgcaaagttctgactgaagtacttacgttgaattaaatcctcttccggatcctccgaaccacagacgatgatagtgtcaactcctccttctagcccgttcttagcctttatattcaatccttcgccggtaggaccatcccattcaatcacttgaacatcaacttgatctatcccacccatgatcgccggcacgttgtaccctctagacccaagagaacctactagtctagcatatgcttcttctgtggaagcgcctcggacaacaacagtgattgtctcaagttcggaagggaaggggcgtcgagtgagacgttcgagaagcgcgcaaatcaaagatgatccatcggggccggccaggaggagatgtcgagtgtcagaagaaggaagatggccaagaagaaaggacggttcgtcggacaacgaaatcgaggagagaaagttggaaacatgggtgtttatgatatcatctccatactcgtatctggttggagtatccgaaggtatactacgggaagtcgattgagtgggaagagatgaacattgttggcctgcttcagagagtataggggttgatagatgttgcacaacatcacggagcgacatctcagggtcccaaggcttttctatcgggatagccaaccgagaggcaagctctgtttggaaggagagatcgtgagaggtagataagccggtatatcctagatcgttgagtgtgagatcaaggatagagggcagggtacgcagggcagctgagaggatggcatcagcgatagattgttggaggaagggaagaggggccattggtgcatgatcactgcgacggatgtttgtgctcatcacgaccagtattggacagttgtagagtaaaagaacaagacgatgtttttgccagctgtgtcggagagaggagacagttttggtcaatattagatcggaacacaaccatctccgtgcatcagagtataaaaacagaaagcttatccaagcctgtcgctttccgctctcgaggacaaattgatgattcacaccttcctcagttcgcctgttgtcgtatggagtacggctgtagattgggagtcccaagacgtggtgaaatgttagggtgatcgttgagagacagtttgaattgtttcccagtgacggcctcgacattctctgaaagtcaacacagatgttgagcaacgaggaagaaattcgagagtcagattagataaggattggtaaccatgtgtagccagatggtaacattgttgaagggagccccctgctcttgtaccatcaacaggatctaacacaagaatcagcaaagctaacaacttgcatcaaactgttctcctctcactctctccttcttcccagcctctctctagactcatgccgaaacgtgcaaagaagagaggaagaccacgtgtgaggccggtgacaccgccaatcgagcaaatcccaagaaaatacgcggaggatgatgatttatcggcctggttcgacaacaatgacggcttgaaatctgacgaagaatggattgaggatgaggttccagtcgaagacctaaatccaacctgggctgaatttagaatgacttttgctgaaagttcgttcatcgcctttgttgactccttgaggaacaagctcagttgcttcctcatcagattgaaaggagagagaaactaaccgttatcgatctttcaaacgcgtcgcatccacctctcgtgtctcacctcacctcacgtcctactcctactctctttcttcttcagttgttgatcagcttcccatagaactccaacggacatacacggttcttcgtgatcttgacttacaagctgagcaacacaagactgagcaggaacggttgtttcgagaatatgtttctgcacgcgttcgaatacatcatcaaacgtcgaccatgaagtcggaggtacccgttaacaggcctccggaacccatcccgccaaatgagctcttggacaggccgtctcttcgtctagaggacgcatccgatacaggagaaaaagagaggctattcacaactgaagagaacagagggacgggattgaaagatgaagtcgatgcaaagacaattttcagaacaaacgggtcatgttcaaatcaatgtacagtacctctacattcttgagcaaacaatgtactcgatctctgacaatgacttgcattttgatccataagctccatccgttttacccagcacttcttcaaccagaactgtcacgaatttcagcttaacagaacatccacatccgcccataattgctgacccaccacttattgaaacgtcgccgaatgaaattctcgctctgatcacccagcattgtcaattaggcatcaaatgcgcagaagagaagttcgcgatggcctctggcgcgtatcaacgtgtggaccggcatattcggcgacttgatgtcgaactcgaggctcacaagctctccattcaggctcaaatggaagcagcgctaaggaaggataagaggaagcttggggtcgacgaaaattcggaccttgatggagaaggtgaagaagtggatgtcgacgacttggacggagcagaagagcttagagctgaagacagaaatggcgaaattgatgaagacgccctccaaacgaccaatcccaggcgcgcctctcgaggaaaagcatattcatattccaagacgacatcaacacccaaaacaaaatcgattgcaacaacggcgacaacgccatcgagcgcgaataagtcgcataagcgtaaaatcaaaggatcgatcgaacctactgttcaggttgatatagagagtgagcaggtgaaagcagtcggacttgagtctgagctaggtatggttaatggtaagaaggagattgtcagaggaaagctcgaaggaatgaaagtcaccgagtacgtgcccaactttgttgtgtttcttctctcttttgaattctttgagtttatcatgtcgaacgatggtggttactgatgtgtccggcgaaacaatgttatagtcatgagccgagatactgctattgtaacgacgtttcgtacggcgaggtgtgtgaattttcatgaaccgacaatcgttgacttgaacttacgagatcttgttcttgtctgctaatcgaattctgcaacgtcttctagatggtcgcttgcgacgtaagtttccgttctatcgagagagtcttgtatattgttcaaatgcgatcagagagacccatcttctctccctttcatctcttttcttctcacaaactaaagaacgacgattgtgccatcgagtggttccatatatcatgctgtgtcagttctttctttcacattctatcgcgtcatgacttgtctggtctttcttaatgttcttctttctttcgaaacatatagggcatgaccaaagtccctacaggtgacttttctctcaatctctacctctcaaaccaatgaaggctcgctctgaccattgatctccgttcccctttacttccgattcagggaaatggtattgcaaaaactgcgaaatccttcgaaaatcaaaaaagaagaagaagatttgaagaacgatgatccaaaaaatcaagataagggtgattgggtactcgtcaggactacacaagagcaaaccaacatggccactaggaggaacattgtactctcggtatgaaggatgagacgagctgggattatcccgtcgcatcttatatttcggagcagaacgctactctcttcgcgtcgaaatttccttcacctgtggttctgctgtacatcttatcatctacttttcaaccacatatgtttgtatatatgatgtcgatcacgactttcaattataagaaaggagatcctctataatgaacccttctgacaagcagggcatgaaaatacatcaaatgcaaattaaagaaaaagtaaatagaaagaggtctgcatctcaattctattcatttttgccttgctttttaattccttctgcttccctgtcgtttactttttccagctctcgccgcaccaccccggctggctccaccaccccgtcc

SEQ ID NO: 3065 - DNA, 31933 bp, Xanthophyllomyces dendrorhous
ggctccaccaccccgtcctcctcctcggccaccccgaccgcctcgtccgccacctctgccacctcgtcctcctcctcggaaaccgtccatgtcctcggtagattccttagtgttggacttcgcatgtcggccagctcctccgaacccgaacttggcgtctcgacctcggcgactcatctgaataggcagccgtatgatatgtgaagaaagaaaaagttggaagcgatatcgtcagttgggttctaaaagacagggattcttggggatttgggatgaaacaaaccttgctgtcgcccctgccacctctactcgaaccagcggctccacccctagcagactttgcaggtctcgagatagcatcctccactttgacgtcgaagtcatcatctccacctgtagcctgaagagttgaatcgtcctttctctttcgcttgagtcccttgagtctatcgtccatcgctttacgctcggtctctcgttcttggatctttgagacttgaaccttctttccgaacttcttgagatctcgctggcgacgggcatcatctgatttcttgatttgcgacctgatgaatatcgacagagaaattaacgataagtaaggtcgatttcattgaatggttcgcgccctcttttgaaaacagggaaatagtaaagaaagactgacgtctcgtccaacatcttttgcctgatcctctccatgtgggcatcactcttgaccatctcggcgtagaaatcatttggtctggagaacggaacaccgttcttggcgcagagtgttcgagcttgttcggcggctgccaaagcttgcttgtagctgattagaagaaacaatcgttcggatttggaaggttaggcattctaggtagatgtctgtgtggggaaagacgggaaagtacatacaaagcaacctctcgctgcagatcatcaccagcttcgacagttccctggacaacctcgagcgagtggatagtcataagctcttcccagttcatgccgacgtagggggcgtgaattcgcttgtgcaaaactcccatagccgcctgggttcggtttgaagtatacatcatttcgaaaagggtttttcagtattttatcaacaacgcagaggttatgaatgaaagagcagaaattatctcaccttgttgtaaacggtcaccttttgctgaggaagggtgtcctcgtctatcacctcgttatcagactcaatgtcgtccagagcgagaagctcatcctcctcattttcatccatctcggcatcctcctcagcaaccccatcctctttttctccgtcctctccttcgttatcctcctcatcttcatcttcatcctcatcctcatcctcatcatcatcgtctgaacctccagccatcatctgcatggcctcctgtacaccctcctctccaagggcgtccataagtcgcttcatgtcgctctctgtaatcacttcactcaaatcgtctccatcttcactgtcatcctcttcatcgtcatcgtcgtcctccgagtcctcgggagcgggctcctcggacgaaggaggaaggggaacagcggctgcaacctttacgggagcgggcgattctttgggagcggactttgagagtttgttggacttgggagttgaagcaggttttgaggacactgctctagctttccctttgttgttgttgttcttggccatgacgtagaaagaaatgcgatgtgtgtatctgttctggagaagaggcaaaaggcaacgacaacggtggatccgtagaaattcacaagaaagaggagagaggaagaaaaaaggagaagctaactgcacagcctgagcacaaatcacgtgtatcacaaccggttacgctagcctcaaacatggttactctccagtcacagacggtccgtgcgcgctccgctggctgtgtccaactttctcttctctcctctcgtcttccaccttcttgttctcctgctgactttgatcactcccttcatcgtctccatcctacttcgtcttctttagtctattgaacagtattcatgtcggccaggacgagctcatctctgtgaggatttgtcttctttggttctctttctctttttctttcttcttgggtttgacgcccagaacagaaacgtggtgtaattttcccttccgtttttgcaaatctctgatatgctaaagagtcagagatccgttgaaggttactgataacttttttttctttcttctcgtgatctcactcggcatctctcgatctcgtcttgctttctgtcctctacaatcgttctcatgtatgctcaatcatacagaccaaagaccatcaggctcaccggtcagccttccttacgttgttgtctgtctgttactcgagaacaggctgctgacgtcgttttgccactattttcatacctcacctgtaacaactcgggattactcatcttgatcattctatctaaacttaacgtttaatacatttctctccttttgcctacccgtctacacagtcgtcgctgctgattctttggccaagcgagatgtcttcacgttagttcgttgtatccttcgtgctcatttacatccgcacacactctcgcttcatgcagtcttaaatatatattgggaattctaaaattaatcaaccgatcttccacctcgttctgacaaccaacagtcttcctaaccctttcgccgtcatcactgtcgacggagaacagacctacacaacaagcgtcatcaagaagacgttgaacccgtattggaacgagaactttgacatgtcggtccttcttacttccactcaccgaagatcgcatttgcaatcttgtttctatcccttgtgttcttagggtttctctggcttatactaggctctaaacctttgctgtatatctccctcctattttcaacgatctgtctccgccgttcaaacgcaatacagtaccgtcaaagagtcttcggttgtcgccgtacagatctttgatcagcgaaagttcaagagaagagatcagggtttcttgggtgtcatcaatgtgaaagtgagcgatgtgttggatctcgagttgggtggacatggtaagttatccttctttggagacgtaatcaacaagctcgtgtgatctgcctcatgaaaaccgtccgttctgctcactatgtgttcctttccatgtctttcctttaacagagatgctcacaaaagagctcaagaagtctaacgacaaccttgtcgtacacggaaagatcatcatctatctttcttctaacacctctactcccatcaccaatcctggtcataacaccacaccctcccctgctcttcgacctgagaatgctggtgctccatcctcctcgcacagtatcggtgacgacttttcaaatctgtctctgaattcgtcctcttcaacaggtgctataaccagcacaggtcctaactcgctcgcgaccgaaagcggtcgtccttctcagatttctgttcctactccgtctttccctgcgcttccctcggctggatgctcatcttcagcgggcggagcgcttcccgttgtatcccaaagtggtgctcaggcagcggcaaacgtaggaagccaggctggaggaaatcctcaacaggcagcgatgaacagaaactttgatccccattcggatcagcacggacctctgccgctcaactgggagaggagaatggatcatttaggcagacagtactgtatgtcaactttcagttgcttctcttcttggtctcatcgtcatgtttcggtcaacaaatcttcatatacaagactcactaagccgaatcttcgatcttatatcactttttttcctttcttatccataaatagacgtcgaccataacactcgaacaactacttggaaccgaccttccccaacgtcgtccaactccgctttggctcagtcggccgcgtccaattcgaccgctacggctgaggccctccagcgacacaacgctcgaacactggcggatgatcttcttgagaccaccgcctctggaggagcccgcgttggagctgccggtgcatccgtcttgggccaaggtgcaatccctaatcctggagcgcagacgaccgctggaggaggaccaatcccagctggttgggaacagaggtttacccctgagggtcgaccttatttcgtagagttcgtcattaccatctttgtcgcacaagtatcttgaggactattgctcaaatcgatctgtatttgttctttattagccacaacacccgaacgaccacctgggttgatcccaggcgacagacccaggtccgagtggtcgatcagaccggaactaaccgaacgcagccgaccactgtttctcagttgggtcctttgcccagcggatgggagatgagactgacaagtaccgcacgggtctactttgttgatcataacactaaggtctgttctgatcatcttcttcgaatgtgccttaaagcgccagagtattgacggtcttcatcttctcttcatgtccatatcctccctaaccatcaccatttagacaaccacttgggacgacccgagattgccgtcatctttggatcaaaacgttcctcaatacaagagagatttccgacgaaaacttatttacttcagatctcagcccgctcttcgacgtaagtccactgccattctgtcaaagccatcttgttctgcaaggttttcctgtaataacatcacattcttctgatctgggttcacagccatccctgggcaatgccacgtcaaggtttcgcgagagtccatctttgaaggttcttatgccgagattatgaggcaaacaccgaacgacctcaagaagcggcttatgatcaaattcgacggcgaagatggtttggactacggaggactgtctcggtccgtacttggtttttttgctgttaatcgtctatcctagtgccatccagctgatcaatcttcttgcgcctttacagagaattcttcttcttgctctcgcacgagatgttcaacccgttctactgcttgttcgagtactcggctgttgacaactatacccttcagatcaaccccaactcggatgtcaatccagaacacttgaactacttcaagtttatcggccgagtgctcggtctcggaatcttccatcgacgtttcctcgatgcttacttcgtggcctcgttctacaagatgatcctcaagaagaagatcgtgttggaggacttggagagtgttgatgctgagttgttcagaggtttgaagtggatgttgtacgtatcgtgtgacggctcagaagtaaaggttttttcatgttcacagactgactgttactcgaatgtttctgatccacagggagaacgacatcacagatgtgctcgaaaatgtctttgctaccgaggaggagcggttcggagagattatcactatccctctcatccccaacggagagaatatcgatgtgaccgaagcaaacaagaaggaatacgtcgagtaagtttgatctgttcggtcttgaggataggaacttgactgctgatgagttgttttttttactctctaagtgccatcactgagtaccgaatctcgaagcgagttgaagagcagttcaatgcgttcatgagtggtttcaatgagcttattcctcaggagctcatcaatgtgtttgacgagagagagcttgagctgttgattggaggaatggctgatattgacgtagaggactggaagaagcacacggactaccgtggatataacccttcggacgaggtcgtcggctggttctggaagtgtgttactgagtggccggcagagaagaagtctcgtcttcttcaattcaccaccggtacctctcgtattcctgtcaacggcttcaaggatcttcagggaagtgatgggcctagacggtttactatcgaaaaagctggcgaggtcggtcaattgcctaagagtcatacgtgtttcaaccgaatcgacctgcctccgtacaagtcgtatgaggcgctggagcagaagttgactatcgccgtggaggagacacttggtttcggacaggaatgagctgtagagaaagacatggcccgcgtgcgagcgtgtgtgctccttccttcctctcttgcctttgtttccatctttttctcagaaaccgttatatcatttgagtcgaccatggctcaatcgtcttcccccttctccgatgactactctctcttttataaacttgtatctattctctgttgctttatctcttcctcacattcttctgtttacttccttctctcttcggatctcccagtcaccatatttgctgtttgtcctatccttccagtcgtgtgcctatgattccttgtcttggccttcaaatttctacaaattacatttccgatcggtccaattctttctatcgccttatatgagcatattcaataatttcatgtctatttctattatcattctctttccgccattgtttttctttgtcttgtttctctttgtttgacgctctatcatgtgtgggttatgttgttctcgacgtcaataaggattgtgatggcttgtgtacattctcggtggctacgacggaggaaactgactgcttgtttagaccagacgcgggagacaaagccaccttcagatggcgtctgataacgcgatgagtgaacaacctcgcctctatctcgctagctcaatcagcctttccttgattgcgtctcgacaaagggacccgtatctcgcctggcctgaaaacagagtgctcacatccatttctatctctctctcatctctgttgtcgtcgtcgtcgtgtagttgcagagaaatttgtcgtagattcgatcgtaagaagaaaggaagaggaaaacaagatcgtcatcattcgagtttcccgctcgatcatcttccgctcaaagggagagataacaaacccgttccatctttgcctcttctttctcccattctgtcgccactcttttgaaccttctcatctttcatatattcgttcggtttcaacatatttgatttcactccatcccatcccgttccatccaccacagttcatcaaactatcatcatacctaaaaggtagaaccacttgactgtttgtctacccgactgagtatctggaacaaccgatcacacgatcctcattacgccaattggtttggttcgactaaactaactatctatctatctatctatctatcaacccgcttcatcaaacaaaccagaagggtcaccccattctagcatcctcaacacttccgttctctgtcctaactttatcatcagcctatcggcctgcatttgactcgaatgtcaagcacgtcgagcgttgtctctcgggaacgagagcgagtgggcaattaccttctaggatcagagataggtagaggtagtttcgcaaccgtcctcaggggatacaaagcggtacgtttcagtctcaatctgtttgtttttttgttctccattccgtcctttatttctacgacgtgtaggaagaagtcttcatcttccctaagggtcgagtaagatggaaggcgatgaagatatgatgagtcccctgcctgctcaaaccttcgaaaccagacaatatccgtcttttcaggttccacgtctctttcctaccagcattggcggggacaggccacaattcatttcgagccatgctcagttctccgcaactcgaacatcttccccaaaggaattcaatgacacaggaaacccgttcaaacatatctgataaacaggcagctgaccccatcatcttgttttttcttacttcctgcgtctctatgttttccgatgtcactctcccttaactttatatcttatcatggtaacaaacttcgggccgaatgggattcggtcaaacctagacgacccgagagacggtcgcgatcaaggttgttcaacgtaacaagatgacatccaagttgttggagaatcttgaggcagaaatagctatcctgaaagcgatccatcatccgcatatcgtcggtttagaagactgtctcgttcgtcctttcgtctttctctatctcaccgtttcatctgtatgactaatctcaactgttggatgtcattccttctgaactatcctcacgatgccttgccttttcatattatcgtatctatttcagaaaatggacgaacgtatatatcttatcatggactattgctctggtggagatctttcgttctacatcaaaaaaagaggccgactgccgacattggaatacgtagcagacggcagtacgaccaagcagttctggcctcatccggaagaaggtggcttggatgaagtcgtcgtcaagaacttgttgggacagctaggtcagtcggtgcctgtactcatcatctgacaggtcatggcagtcactcaatcacaatcccatgtatccgtcccttttctcgaatttttagtattggcccttaaattcttaagatctcaaaacctgattcacagagatatcaagccccaggtaagtccttctctccccgcttgcttgactattagtcacatgcacatatgaccaccatgtttaatacctggttgtattgagagatcgtgctaactacttaacggactcgtgatttgattcggtagaacttgctgttacaaccacctacgctcgttcagctggccggaggtcacccgctgggaattcccattctcaaggttgctgacttcggattcgcccgcttcttggaaggagcgagtatggcagagacattgtgtggatctccgtgagtgtacctttttcgagtgagatgacgacatttgttttataaacttaatgactttgttgatctctctcgttttcgaatcgttcctcgcgaaccggtcacaggttgtacatggcccctgagatccttcgatacgaaaagtacgacgcaaaggcggacctttggtcggtgggtacagtcctttatgaaatggccgttggtagaccgcccttcaaggcccaaaaccacgtcgagcttctgaagaagatcgaaagaggagaagatcgaatccggttccctgatgagaaatccagttggaatccaagtccatcgacggaggagggtttgcctgtgcagcagcctgtcggaaaagctgtcaaggatttgattcgaaaactgctgaagcgaaatccggttcaacggttagggtttgaggaattctttagacatgaggtttcgattgagtatgccacagcgatcagcggcggtgaagaggcagaacgtagaatcgaggcacgggcgatcttgtcaaacgtgccagcgtcgatgatgcctaccatgtctactccccccgaagtcaaacgaacttccctccaggcccaccatcgcccaccacctcaacaacaacaacaacaacaacaacaacagccaacgccttctatgccttacccaattccaacacccgtccgacccgctccatctttaccaccgttcgcacttccgttacccgcttctccgccagttcaatcatatgtgcctgcgacgtttcatcagacgtcatcttcaccaaccaatcgaccgcctttggctcccttgacagtaccgtcatcatcggaacttgcttccgctcaatatgcccgatcagctgctaggccgatgacccctccgctaacttcccgtcaatcatcaggagcatcccctgctcttcgacaatacagctttgaaccaaagtatatggtggatgatccgctggcggccagatcgcctactcatcttgagtcagaattggatgatcgggaaggacgagggttgatagggagaagagagagtcactcatctgaccgaagagtgtatatgagggaggttatgtctgacgcgaacggacgaagagatgaacctcaagtgaggcccattaatttagacgggacaacaccggactcgagagcttctcccggtgaggtcgaagaggattctgcaagcgattatgtgttggtcgaaaagcgaacggttgagatcaactctttagcagatgaactcgacgcggcgtcccaccgaccgaccactgtaaaccgtcgacgaagttctcgaagtttgctttctcgaccgatctccgcccttacctcaggaactagtccgcctctcagcggaggatcttcctcttcctttcctcattcgacctcgttcgcgctgtcgataacaccaccttttgcgctcgcatcttcgccgaaccgaccctccccgttgcatcaacattatccccataatccgcatcatcaccaccttcaacaacaatatgcggtttcttccttaacccgtccgctctctgttcctcacacaccgtcgtcgttctcgtccagtccaggaggaatttctacccctctgatgagcgtcaaccagacgcaccggtttgcctcgtctcctacagctggtggcgtcctcgccagagcattctcactcgcttcaggtaagttctttggcgccagtccgtcttctacctcggctgcagcaggcgtcgtcgcccgcacaacggccaggaagaaggccctcattcgagcgggtacaaccgatccagcggaggacgctcttcttgcccaacttgatgatctggcacagaaggcgtttgttgtgttcgattttgcggacgtcaaagttgaacagatcttgacattcgcaggtcaaggtgcaggtcaacatgttttaggatccaggccaaactcgcctggttcttcaggagggttccagcagcagtcgactggtcaacagccgatgtcatatcaacctcagaaccccataaacactcttgagcgaaggcgatcatccgtccattcaacttcaggctcggaagctagcgtgttcaggatggatgttctcgctgctgaagcgttgttgttgtacttgaaggctttgggtttcttgcaaaaaggaatggaggccgccaaagtattttggatgagtagacaggtcggacatactgaagggggtggggaagtggatgagaccagtatggagctcaacgagagtacgtgcaagtgtttgcaagatctttgggccttgtgcgattaattgattgatattaataaacaaattccttatcagctgttcaatggttccgagctcgttttaacgagtctttcgagaaagctgaatgggccaaagcccgatcagctgatgaaatcccagagtcggctgcgttcgctgaacgacttctctatgaacgagctatggacttggttcgtcttgacaattttggagaatttctaactcagttttgaacagtggtctaattctcgttgcttggcttcacttagtcccgaacggcagcgattcatgaagcgttgaacgaggacctcggatcgatcgagcatgcctacgagactgcggtttggatcttccaggctatctcggatgatactttccgtgaaggagcatatatggaggaggaagatcgtttgacagtggacaagtgtgagtggatcgtgacgttcctttctctttagaggaggaattgaactaatttataaattttccatacggacgggttcaatctagtcttgaaagcctgtcagaagcgtttggataatgtcagaaaacgccaggcagctatagtagcggccactccgtctggtgtggggaataaccaaccctcggaagccatgtaggccagtaccaacaactaacaggttatacactcttgtagattttctccgatatccgtatattctcttgaactcaagaagccgatgccctttccttcactcgttctcttctacctgcaactgtccttcttctcttctctttcctctcctctctctagtctactctgactactcttccctccactccactccactcaactcaactcaactccattccaactatcggtttcaaatcttctcgatctcatcaaccatactttctttagcgattccattctttagataggatgttcaacttcgtccgaccatcattattctgccttcgacggattctcttttctctctctctcttgtcattgcattcagtccttcttgtggtgtttcgtctcatacttcgtgagtctcttgacagttcatctcgcgctgatctcttcgtgattgacattcatattattatttggctttttttcttcttgagacctgtttcggcttgtacttcggatggtctgatagctcgtacgcaaatgtatcgcccgaatatcgagtcgtttcttctcattctctggatctcttcccatttccttcactgtctgtctctctgttcttccacattccgcatcttcttttccatcattcatctcagctcgttttctctgtttctgcttcttgtctaccgacgtttttcatatactccttcatcatctctacttattctcatttctctctttctttttctatcgcttctgttgtattatcggcgttcttcgcctcttcttgtttatgtcatggttttattgacatctcttcgcctaatgtcgcgagcgaaaaaatctactcaaaagaagatggctcaaacccgaggtgcatgtcgctatcgatcactaactcaatctttatagtttctggacctctcgtttgatattactctccaagaactctcttcagccgcccgacccaaagatgatggcccaggaccaactaggtttcgttccacctgcgccatctgttgaactgctctccgttattaaagggacgtggtctttgtacttattgacgaaccggagcattttcagcaggagcgcttgaagagcaggttgtctgaatgtggagcagaagtgagataagtccatcgaaagacgttgaatcgtcagctcgagagccatgtcagatgaggaaagctaatcagaaaactaacgtgtagtccgtgctgatactcgtacgttcttgttatattcaatttttcagatcaaaacgaaaaagaaggattgaatgagattgtatcagtcttctcggccagagtgggtagagagtgaaggcaaggtgatactgacgacgttcagattgacccgtttgaacttggacgttaagtatccacttctcccatgcaacgtcctcctgtgacattttttccaaacgaacagaaagatcaagaatcagaggtgtcgatcagaagccgaacgtgaaacgttagaaagaaggggcgcattgaagaaaagataggaagaacatacctcgccttttgcgaaccatgtctttttgggtctcttttctgaaaaaattagcgaaatctgtcatgggcaagcaattccagttgtagccaccattaaataataaacaatgacattgaaaacaagacggggatgttcagatcagttatcgtatggcttgagttggtattttatgctgatacaagatcaagacagtgtattctttacctggccattccaattccgtactgatccaattgtcctccagaaagcgtcgactcggtcagtgactgtctttgccagctctggatcattcggtattgactgaggatataacatcatgacttcagatcagtctcttgtcgagctcgttcagtctatagaaacttgagtttcttgacatacgaatgtgattcctaaaacgtctaatgtcgtaggtgatacagttgagtacgttctttggaacaatatggcaagtaacaaagctgaaatgagtgatgtacgagctcatgatcagcaacctttagcctttacatgacgaatcatgatgataatctgtgatctttagcacacctcgaaggacgtctttgacttgggttcgttcgacggtctacgaactctgaagagcatggttttagcgatctcatgcagtaaagaaaataaagactgagaagaacaattcaactgacgaatgacgactcaaatgtctggcaagctgttggatctttagagtacatcagaggaatgattgagagttgatggttgacaagagaattcatcaagatagataagcgatttatcggtgatcagcgatgagacatctcgcacgaacggcctcggcctcgtcctcatcctttccattattccggtcgttcatcttcttttctttcaacaacacatcatctcgatcgttttgatgcttatgagtctaatacggatgtgtgcaaactgcccgagagtgttctctacaggaaacatcatagagaaatcgaggctaaccaaaagaatcacgtcattagccctgtctaaccgactttgcaggtgcatcatctttcgccattacatataattcagagcaactttgatgaacaactccgacaggctttcctcggagagaagtccgagtagaagacgtataaaacgatattggatcaggtcttatctcttcgatttgtacacatcaaaaaaacatctctcgatccgaatatactactcaccatgagccttaagccttctctcacctttcaacgagttggatctccttcatcagatcatacactggaaattttcatcgactatcagtgtggccggtgagtagcactatttgtcgttattattcgtagccttccctgatgactgacatgtatttctgaagagccaaggcaatcgttcaggccttgaacaattttattgttcctcgtgagtttatcctagacagctcacagcttcagacgtagaagctgagcttattcgaaacccacgaatcgattgatacctaatgcagacatcaaggaaggcggcaagctccacaacaagctttccgttatccttcgactggcacctcagaattggtaggtacaactggcatgcctttgttatcttagtcaagttatctcactgttgtgctttttcgtttcaaggttcgcaggcatatatcctcgtcatacctagctgaagcagcccttgctgtcggacatttggaaccttctgcgttttgagaatattctttagctctgtatgacaacaaagcatcattcttgaatgtggttgtccaagatttgagcgcaactcagatccgaaaacaggcagctgagcgtatgtcgatgtttctactgctgatatctaatctttcaatgggtatatgtacttgcgctgatttctttccacctgggatctgatatcatgattgattgtatgtccagtcgccaagccgttcacgacggcaagcgtgttagacgccatcaccaacaagacacatgcaagcctaggaaacaatggacccaatacttccacacctgaccttcagtacaacagtaaattctatctcgtttttgctgagtcacgcttaactcgatgcgtctcatttattgcgctacaatcggtcgatccggaactcaccgtatttattctggtctttttattttttaaagtcaagtacgctagacaactatcaattcagcacaccccatcggtcgcgctggatggaatcatccaaggacacgtgtttgacggaggcgtcgtcaatgggattccctccagttggggacagaccgagtgggatgcttgggttgagaaggaggtgctcgcttaactcgttgggtcgggtctaattagttgtatgctcatttaaataaatccttccgtctatacatgctgtgttcccctttccttgtttactatataaaacgagagaaaagtaaggttgtgtgaagagaaagtgaagatagtgatgcggtgcaagcgtgagcgttgcatacattctccccgaacttgggatgacctcatgggtggattgtgcactgaacaaccatagatgagattgataagaaagtgaccctccaaccaacacaccaactcttcaaacttcatctcgtactccccatgtttctctcattgatcagatcagttgcttgtttcgcattgctctcgctgactgttcacgggcacggtcaaatatcttcacacaagacccggatggtgagcttgggcttcatcgctttcatcttcggttggcgatattgatttttggtccttgtatatctatcattcggggatgtgtgatcggtacaggctgggccgaaatctaaggaggtctgtgggaaagcattcaacggtgcgcgatatagatccgatatatatgtggagtcttatgaagcggactgatgactatttattttctgaacgaggaatttatcagacctttgggacggagaatacgacttgaatggtccgttcctcatgatattcactttgctcattaggtcctgttttctcaatgataggagtttttacctgtgctcttctggttctttaattgacagatagagttggtccgttgttctctttcgagccgcataaccggtccaaggactggcctcccgagtgtaaatggtgagacggctcgtcgctcagcatggtattcctaactatacatacgaactaatttcgttcgacgtttgtatatgcgtgcacatcaacccaggtacctctgccaaggaaaacagttcgaagataataaagacaatgtatacacgttctctgttgggcatcatctccacttggagatcttcattctagctgcccacgaggggactgccaatatcagtgtggttgacctggagaagaacgaagtcagttctgctcaactcagaagaggttgttgaaagatcttttagatgttgagaagagactgacatcaaaatgtaacaggtgatcccaggtgcgcaacttcggtattggggtgagggatacgccaagctgaggacatacggagatgggccttaccctcctgctgatcaggtaaacatcctcttgagctgtatacctattcgcaatgtactcgtaatcactgatatccacttttacattcgccaacaaattaggtcaattttgtggttgagatgcccaatttggatggacagtaagcagtgatcatccgctcttgtatctggatagtttctctttgacaaggttaactctaaatgtgtgaaacaattatcaggtgttcccaacctggtcaatgtgctatacagtggtggtggtggggtaagcagagcgcgagggaccagtattatgagagctgtacgtctcttcttaagacaaatgcatctgtattatatactgtcatcaaaaacgagtggctgatcgatattcaaaataaatctgttgctttaggcatcgattttgtgcagcctcaacaagtgacggttgatgaaggtggtgctcaagaggtctttggtgcacctcaaggtcatcatggacactgatgagttttggtgtcctagctccctccttctctcttactcatcacctctttttttttctctcacaagaacaatcctcccatatgtctcttactctctctatatacgtacatatgtctctatatctgttcatatacattatttgttcataatgcacccaaaaaacagcaaagaaacagtgtatagaagagcctagtaaagaaaaaagagctggctgctgcgcacttgcctagagggtgaactctttttcgctggcatctcttcctccagtctttttcccttcaaacaccatcgaccctttccatctcgctccatcaggcttccacgatgggctgtacgtttgtctctcaggttgattgatagccgttcgggttcaagagagaccctgtgtagacttcctgacagtcgtttactctatttcacatctttctcgtcctttgtagtccgtttcctcaaccttgttcggccgtttcaggcctttttggtaagtcgctcgactcgtccaatgggctcaaactgttgatggtgtttgtgtctcttgcttttcactcacacaaccctgcctttgctcttgttcttctttctcttcagcctgaggtcactgcaccagagcgaaaggtatgatcgacgtccccataatgatgttaagctccaagacaggtcgccatcacgctcacctctttcctactccatctcctcgattcaggttcctttcgatcaaaaagttctctggaccgctgttactcttcttatcttcttggtgtgctcccaaatcccgctatatggtatcgtcagttccgactcgagtgatcctctctactggatgcgagtgattcttgctagtaacaggtagggctcttttttttcctcagcgccctgacctttcatctctatcacgcgataaaacctccaaagagcctgtatactgttcagacgaagctgacagctagtcatttgtatatctgtccctcactcttcatcgcagaggaactctcatggagctaggaattacccccatcatcacttctggtatgatcattcagctcctcactggagctcagctcatcgaggtcgacctcagtgtggccgaggatcgagtgctctacggggctgctcagaagcgtgagcctattcttcttctacgcgaaatttcaggattttattgtccagcttcctttgcttctctcatggttcgatccgctgacaaataggttatttctatttctccaaaacatctttttgacgtgtctccatagttttcgctcttatcatcgcttttggacaggccactgtctacgttctcacaggtctctacggcaaaccttcggatcttggagccggagtgtgccttcttttgattgttcagctcgtagccgcgtctctcatcgttctgcttcttgacgagcttcttcagaagggatatggtcttggctctggaatctctctcttcatcgctaccaacatctgtgagaccatcatctggaaggcattctctcctacgactgtcaacaccggtcgaggacctgagtttgagggagccattattgctctcttccatcttctcttcacctggaatgacaagtctcgagctttgaagacagccttctaccgagacaaccttcccaacgtgatgaacctgattgcgaccgtcgccgtgttcgctgctgtgatctaccttcagggtttccgaattgagatcccggtgaagaacaaccgattccgaggacagaagggaatgttcccagttaaactcttctacaccagcaacatgcctatcatgctcgaaagtgccttgacttccaacgtcttcctcgtcagccagatgctcttcagccgcttcccggaaaatatcttggtcaagcttcttggtgtttgggaggttcgtacctctgatcttcagttttaatcgatactaaagtctcaaaatcggcctaggagctgactttatgtttaccacctacatctacggcctatacagcccatcaaggattcatcccagctcaacgccatctctggaatcgcttactacatgtcccctccccacacaatcaaggagctctttgttgatccccttcactcggccatctacatcaccttcaccgtcactgctgtgcgtgtcctatccttttctctctgatgtttgtatgttcgagaatcactgttcttattccctctttgtctcttgtgatgcgtggcattactttcagtgcgccttgttctccaagacctggatcgatgtgtccggttccggcccccgagatgtcgccaagcagctcaaggaccaacagatggtcatcgccggtcaccgagagggatcgatgtacaaggagctcaagcgagtgatccctacggctgccgcttttggtggagctattcttggtctgttgagtgtggcggctgatttgagtggagcattggccggagggactggtatcctcatggctgtcactaccatctacagctactgggagattggaatgcgagagagcatgggagctggggctgacatgggtgctctcggagaactcagtacgtcttcacaacactccttgagcttgtcgcacaccttggcataggatgtttctgccaggtctgaatactgattctcttcaattctgaatctaaaacagtgggatgagcgaacagtggagggttgaactgaagagaaaggagatatgagatcctcctgtacggagaaagaagatgaaaaaatgcgatcagaaccaatgaagtaagatatctcgaaggaaatggaggaagaaagtcaagtgtgggaccggaagagagaggtcgtcttctttagaagaatgaacatgcaattattattttctaaaaatccccgatctcagaatgttctgtcagagtacatacatcttgtctattcagtggagaacctcgaaagaagaaaaaagatgaacacatatatatgtacaaaactcctttattgaaccgtcttctttgtttcttctcgagatattcttttgtgtgttggctgaagcaaagggaaggttccttttactttgtttcgatatcaatatcgtaccctttccctctcatctctccgatcaactctttctcgacccctccgtcagtgataatcttgaacctaatgacttggaatgcagatttcttgtttggtctatttgaggaaatccacacggagaaaacggagataattaaagggccggtagataggtcagcgctgagagctctgaggatgtaatgagaagcaagggaaaggataaaaggagagagggctgtaccggatcgaagtaaagtagacgcggcctgcttcttccactcccttgattcggaaactaagatgtcaaccggatcagatcggattggttcgacgagtgcggttgagatgaaagtggaagatagaatgatataggaaggggaggaggagtggtcaggtcgtttaatttgtcaaaaggaagaaaaggacagatagtagatctcacctcaggtctgctttccccttgaggacgttgatctgtataattaaaagaaaggatcggagaggtttgagtcgagtctcaaatatcgttcgtgggttccggtaccacagatacagaagggaggaaagagagggcaaaactaacgtttccctcaatcctgaatccgaccaaggcggccaaggaatgagagaggacaaggcaagtcagagttcacttctcaacaagaggaacgagggagtaacaaagacactcaccagggttcaccaccagtccagaacgtaggttccagatggacaccatcgcctagtaactcctcaactgcctcacttgtccgtaagacgaacatgacctgcctaaacacggacgacgtgagcttttcagaattcgtcacccaaccgatgaagaggacccaggcgattcctccaaataggatgaccgaaaccgctgtgtacatgagaagatgaggtagaataacccggttagcgatgttgagtaggttaaggctgaatgggaaaataagcctggtcgaacggacctggcacccagtaggtctgatatcggcaacgagacgatatgtacaattagccaattggtcagttgacacaccatgccaagagcacacagagaactagatactcacccttgtgtttggaagatctttcagctcagtagccacgttaagtctgggtgggtgagaccattgtccaggcttacctaccgatcgttggtttattcgaagcgcatcgtgggattgattgggcactctttgtctgggcgaagctgtggtagccaagattggttgagaccggacgaaacggagaaccgagctggtcgaaaagggagccgctctttgcagcctgcttgctgtcgaaatactcctggaaacgagtggcgaagctaacatagatgcgtgatggacgagggtgatggatggatggacggatgctggataggtatgagtgcttgaaggtgagagctaactgaattctgcttagtcagctttgtggaaaattcccaaacgtgagcaaaaaagaatctttgtcggttttctctttcctttgcccagccagcatccccatcgagagtgaagtctagcaagtacagccagctagccagtccctacgtagatccagagagcagtccaaacccttcaatagatctagaagagcaacatggtcagttggcttgtagttcttgtctgtaggggtctggttttttgaaggctcatccagatgtttccttttttttcccttttgctcttccactcttttcattcatacagagacctatccttcttagtggtgagtgtctttgggctcttgtgttgcttctttttcgtgtctacacgtcctgcattctggactattcactcatcatgtacaccttccttcctctctatctttggttccaccaggtcacgagcgatccctcacccaggtcatctacaacgccgatggtgatctgctgttttcgtgttccaaggaccacgagatcaacgcctggtgagtatatcatatccttcattctctctttcaatcgatagatcctttcttggtagacggcgatggtccatggcattcagccagagcttgcatggtctgacagatgatccttcgcgcgatgaatcaacaggtactcgcacaacggagagcgactcggaacgtacgttggacacaagggagctatctggtccgtggctgtcgactgttagtttctttctatatccttttgttcatgtgtgctcgcagaccagttgggcttagtcaattcaaccttccctggctccccgacccgattcagccaagtccgagctcctcctctccgcgtcggcagacaactgcatgaagctctgggctgtggccaccggaaagtgccttttcacttgggagttccccaccgccgtcaagcgagtttcctggaagtgagtgattcatcttgctagggctgtctgaaggaagcgtcaacatactcaatccgaacaccctcttgcttcctcttcgccagtgaggatgactctttgttcctttccatcaccgagcagcgatctggttaccagggagccgtccgagttcaccagatcaaccgagaaaacttgaccgagcgtgcgttaacactttctttactttgagtccatttggcttcgagacactaatatgtctattgatatctgtaaatctcttcgctgcctattggttcttgaatcgtcaacacttcaaattgttcaatctcgttctcacaccttacccaaacctgtctcttttgccgacctttctacactcaaccttcttgctgctgctactcgccacattctttctcctttcacgtgtttcaaaatctgcagaatccgtcgagcctatcactgaattcaaccctatcggctccaaggccaccgtcgccgctttcgcccctttgtcaaagaacatcatcaccggtcacgagtctggaaaagttgccctctttgacgtcaagagtggagaggaggttttgtcgaacgagaaggctcacgctggtaccgtcaccgacttgcagctcagcaacgacggaacttactttgtcactagcagtaaggacaagagcgccagggttagtcctagtctagttttcaaggagaagacatcagatgattcagggaggaaccaagcgtgaaacggtgttcccctagaaggagacaaagactgaccgagattcactccatgctgtctgcttttgtgttttcgttattagatacaccgaacggacgatcttcttgttctcaagacattccccaccaacacccctctgaacagtgcttccatcactccctcccgcccgtacgtcatccttggtggaggacaggatgctgccagtgtgacgacaacttctcagcgacaaggaaagttcgaggctaggttctggcacagagtgttcgaagaggaggtcggtagagtgagaggtcatttcggtccgttgaacacagtggccgttcacccgtcaggaaaggctttcgcttctggtggagaagatggttatattcgacttcattgggtacgtctttctccttctccttggttttttttttctgatgcatcttttgggagagggttgactgatatcatggaacggcgttctgttttcttagttcgatgagtcttatttccgtgcacgaccttttggagatcttgagccggaagagtaaacagagtggacccattaaaaaatccagaaaggaggaactttctttccttttccttccttttcccctctcttcttttcttgatttctggcttcgatagttttaccgcttgagtagacaaataggtgggagagggtagaggaggaagatggcaagaggagggaagtgaggttttcttttgctgctgtttaggtaaagaggtgtagcatttttgttttctttctatcatgacttttcattactttattttggctgcatagcaagtatcgtaaacattggtctcttcgtagtgagcatgatctgatcccgatgaaaagaggggagaagagttgtttcagattctccagagattgaacaccaaatgaagatctttcaggagatagtgagcaagaatgttttcatgttgatttgaaaggatgatcaacatagttcacatcaatatcccagcccagcccatactttctctgccaatctactcatctctctcttcaccattctcactccttcatcatgttcattgttcgtctcctttctatcaacatgtggagcctcgagcagaactacaggtcttccgctatccccacctgcactgacctcaggaacgagaggaaggtcacccagaacgggcaggttgagttcacgcgctgcttggtgaaacttgtccggaggaccgaatggatagattggaggtgtcgtggggagatgagacatgttcaagaggaggccgaatatcttcaatatttgataatatgatcgatcagaagggtgcgtgagtaaacagtcacatatagtttaagcggttgagcagagagaaggagacggactgggatggagagtttcttgaataatccgacgccttttcgagcgtcaatcaaggcgatatcctgaggagttgagacgatcaccgcccctgttttatgcagttgccggaagaaacgcccaatttagatgataaggtccaaaagaagaaaacagaaaatacaagatacatcaaaaagacggtctccagccgaagaaaaggtagactgaccgtcgacaatgacgagttgaccgagcgagagtgcgacgtcacccgttccaggtggcatatcgatcactaacacatctaaatctcgacctgtcggacgatctgatgattttgtagacgcagttgtgtttgagtgcgcgtctgaggtccaatcggtatcgaataggagctgatgggttgtttgatggaaggaaaaaagttatggcttgatgagaatcctcaatacgattggaagaaacagagagaacgtaaagagtacgcacttgttggacggctttcatcaccattatccctcgccaaacgatcggattttctccggtcgcagactccgcttatgatagcgtcattgaagagaaggaaacgtccagtaggaataacgagtcaggaacatctaatagctcaagtacattgaccttatgtagaaagacacaacggcatcactcacgaactagatatcccatcgacatggtgccaactccatggttcgtcataggcaccaaccgtccacctaaatttccgtatgaaaagatacgaaccaaacacaagatgtcagcctccggtcattttgaatctgaatgtgagtaagctacacttgaaaatgcgcacatgtgcgcgaagcaaagaagaaaagcgtgtaccaggtgttagctccgcttcgcccaagccctccaatcccatcaactttggaatcgatggtccaaagacatcaagatcaagaactcccacacgcttagtaggttgtgtgagtagcaatgaaagcgcgaggttgactgaagcccatatgatcatgaacgtcagctctaggatagcctcagatatcagaatggatagagaatgcgaaccagcgactgtgctcttcccgactcctcctttcccactagcgacgacaacgaccttttttactcctggtattctggacttccttactggacccattctaggcatgaccggcggtctattccctgcatccttattcgacggaagaccctatgatggatagagagcatgttagggttagttacgagaaaggctcagcaaaaagtcaagaacgcaggtagaaaattaaggctgacgagaggatttgaatgtgacaggttgggtacagacaaagaaagagacctaaaagcgtgcagtgagcgtacgcttgagcgaacaagacctgactgcatggctgaatggctgatggttgattgccgatggtagtcagtaagatggtgatgggtgatgatgggcccctcgtcctcttgcacttgtactgcttttcaagatcacgtgtaaacaatgatgtggcgttcttatcgatcaatttacacacccgctctcgttcactatcactcactatcatcactatcaccatcaccatcatcatcatggtctttctcggcctcatctctcgcttctttaggtaagtttatattctggtcgatgtgatagaacgcacgttcttacgaatctggcttgttttgctcctgtaacagcaacctcgccgcctttgtctatccgtcctacgcctcttacaaagccctgatcgagtacgacccggcacagacagaacgctggcttgtctactggacttgcatcggagctcttacagggctcgagagtatggtcagctggatagtggtctgggtaccgttctattcggaaatgaaacttggttttgtactatggttggttgcccctcaaacagaggtcagtcctttctttctccttgacaagagcctatgagcgcacgtggatgcgtgtaggaacgaacagagaacagaaaggagctgtacttaggatggatatggaggatgaaaggtgccttgttcgaaaccgaacgagtgaagtttcggcaaggagtttacctaatccagcgccgtataggtcaatcacagatcgcctatccctctttcatgcatagtgtttgttaaacctttcccgatcacaccttatggaccatcatttgtttggtcatatgcatacttcacttacatgtccctgatgttcaactctaatccgataaaaattccctttttatcaatcagggatctaccctcctctacaagcaatatatcgcacccttctttgactcccacgaagccgatgtcgacgctacacttcgaaatctgcgctcccttggtggaacctggctccaaaaggcactcacctgggcttggaagacagctcgagagcagctcaatgtgcgagaactttctcacttctttgcgtttgtataacgtctgcttatcaggtgccattctacattgttactggattctagctggcggcagtattgcccgagaattccccatttaaccctaccggctcgctctcaaatccttcgaaatcctccaacaacggcgtaaatgcccctcatatcactcctattccttcttccatgcactctccctcatttcctccgactgaaggagcgtcggaatccaatactcagcagtcccaggcattcaatatcgcttctaatttgcttcatcagtacggacctatggctctcgctgccggccaagccagattcggctccaggtcagggcctactcaggcgcaaggatcaagcctgcctgcaggtagatctttctctgactcgaatgctactacgcttgctagcggcgccactaccacctctcgatcccgaccaactacctctcccacggctgtgatggacgtacatcaacgtcgatcagcgctcgaagctgagctggctgctttaccttccccaccgagtggagtgccgacccctagttcatctcgctcaggaagtccgtccgtactggggaagagcgggtatgaggagatcggaagggatgacgtgaagatggacgaatcgagtgcggctccagctccagctccagctccagcggcaggatcaggatcaggatcaggatcaggatggtttggaagctggacgggtagagcttcgggatatgggcagggcgaagaaaaagctgggaaacaagattaatccgttatcctctcttattcctcatgtatctacgcccatacgtcttgtacttcggtctttcgttcattcgccttgtgttcattgtttttctttttgcgccttctcactctctcctcagtttctcacgattacacccgtcctctttgtacctgtatccgtccatctgattttctctgcaccgtcctctgcttcatggtcccatgtattcattatgtctttttctcatcctgtaccagaaccgatagaacttcagtgttctgaaaagccacaagatgggaagagattaaccatggtatacgagtgattagtaagaggttacgaggtcaaactaaagtttttggagagatgcattgtccgtttcgtttcaattagagaagggtatacaagaggacactgaagaagggaatgcagtagagaaagaatgccggttgtcctgataagggtggaaacgtaggaaggaagcgcaagaatatgaaatgtgtagatatatataacgtttggatatgaatgagcaatactaaatggcgaagaaggcagctttgttctcgcatcttcactgtcctcctaagagacccagcagcaacctagcgcattcttcgtccgtcgcgtccactcccgccccgttagcaccaccactcgtaccgccgtctcctctagccctcccctcttgagcgcctctcacctgtctctgtccttgtccttgcgcgaacgcatgctcatgctttctcatctgagcaagttgggattgcgcactttggtgaggtcttccggtcccaataccggccccaccgccgaggacatcctccatccgtacagacggttcgctgatctgacccctcctcatccttttcgtccgactttccgcttcccagtctggatcgatcctatccggagtacccattgtgacccaagtgggatctcctcccgagttgaggctgcctcgaggtcgtttcgaaagaatggaagaggtggaagatgagtgtcttaaaggcgttcgtttcacagaagatcgaggtgtgctcgttctgatgcccgttgagggtgatcctgtgagacctcctgcgcctccgagcctgatcccgccattggtgttggcgctggtagctcgggaagctgcccagtctaaagaggcggatttatggatgggtgtccgatgagggaatttagttgtcgagttcatcttgggcgtttgtgatactccagggggtaaagacgcttccggtagtaccgctgtatatgagggggctgtggccgagtaagaaagcgccttgggaattgagaatgatgaggatatcgatctggcacgatgatgggttgaggttgacgtgaatagagtggaggaagaagctgaagaagagggtttccgttgagaggtcagttggacagagtgataggttgctgggactgatgaagagcgagaagaagatgaagatgtcgagtctgatgtcgaggatactgagcctgctgttctaaacggaatattcggaggattattttctcgatcagctcgagaaaacagagatccggcagtagtaatcgtcgtcgtcgacgaaagaggagggcgttgagtgaacagaggtcgacttcggcggtaggataccgaacgagattttgaggctcgaggtgtttggctatcttcctcggtgtcttccccactcgaaaagtcatcttcggccatttccaagagatcaccactaggaggatcactcatcatgttcttccacaaatctcttccgtctcctaaagacgggtcgtcatcgacagccataggccgcatcaaagatacagatgatgtgggtagcgatgagcgatggatctcttgtcctcgttctctatttggaccaatatgagacgacgaagaggaggaagaaggcgaggcggaggacttggccgagatataagcgaagggtagctctttgttctgaaccacagcatccatcattgatcgagttggcgctctatttgaatgaggagacgacctagacgaaggtgtcttttcgacagacgttcccggcggaactgaaggaggtctagccgatggaagagttgactcggaaaaagttcgttgaaatagcggggaactcttgatgggagagtacggacggggaaacgatccaacagatggcggcttacctacgtcgaccttgggcgttcgacgataggtctcaataggacccgattgggtcttactgggtatcgaccgagacgagctatttggataggtcgaccgcgggaagagcggcaagacggtctccttgtggtttgctcttacagggaacgacgagagtggtgcttgatccgagaagggatcatcatcctctgatgagaatgtcgatttgggaaaggcgtgggtcgacatggcatgaatgctgagtgcgccagtgggacaaacatttctgccttgggatgaggaaggaggatggtcaggagcgcgtttcttctcagtctgacgcttgttctgaaactgaacggacagaagcgcaatgtcgggtaaagtgatgaagattgatcagatcctttatgtcaagacgatactttgaaatcatgacagagcgtgaacatacccagatctgtacgtgacgagccgtcctgtcgaatatcgagcagtgtaaggtcattccacaagacaaacgtaagtttccgtgatttgtacgaaggaccgatcacagcactacaacaagaggaaaaaaccaaggaggaaacaaacatttgaacctccagcgcgattgcttctcgttctgctgagctcggtaatgggtttcgcaaaaaatgaccttccaacacggccaactctgctgggcttgttcgccttcgccgctttcttttcccagatgacgatggatcgggttcagtccccgtacccgaggacagaagagattcgtaccgagattgactgagtgatgacgcgtgaggagtggagacggtcagccgaagaggttgagttccaacccggttcgagcgtgatgatgatggagaggatatactgagcgacatgatagttgaccgaggagtcatcaatgaaccacccgtcgaactcataggtttaccatctgcaatggcgggtaagcgcgttggaccaagagcctgatctgaagacagaggagctgtattctccgatgaagattcaaatggtaaaccagggtcagacggttgagaggatccaggttgagtggcaatcaagccgatagtgtctgactgagaatggacgtgtctgtcggagagcgcgtcttcggaggctacggtcgagaccgatgttgtcgacgacgaggacgatggtatgagcgaaggtgtcgacaaggcaatcagcatggcaggagctgacaagacaagctgttcggattctgatgcatcttcagctttggcagtgcccgctggttgagatgatgatccgagtgacgtctcggccgatgaggagagtggtctgaatgatgtaatcagctgatcgccagaaccaccgtcagtgccaccaggaaaaggaatgtcaggaggatatgacatgaacgatgagaatagattaagaggaggagaagagtccacgttctgtactgaagagcaagaaccgatggagttgaaataaaaagatgagagagagagaaagaagaggatgagtggatctttctggagaggtaagttggatgaatagaatgaacgcgtcacgcgactgagacgcgttcgagacgcgtctttgcagcgcgtctcgatcacgcattcggcatgtcatttgattaccgtcggtaaaggtttatcatggtttaatgctgatgagtgtatggtctggcctttgagataactcttggtgggaagcaagtttgcaaagaactgttttccttgttcggttgttctctttattaagtgtctagcaaaagaccactatgcctgggacattggtctgctcagtcattatagacgcacactctcatggtacactgtacggttgaatgattcgacgattcatccacgaacactgatagattgcataaaaaaaggtccataaaaatacaactcgctctagccagcaaaggatcagaaataccctcctgttccctcgttgtttttctcttccacgcccaactttgtctctactcctatctttcacgccatcggcggcggcggtggaggaggcgggatgtttcctaccggtcctgttcgtcctgtccacccaggaggtggcactgagtagttctgcggagtgaaaccagccggaggtggagggtagttcgggtacgacggtcgctgctgggccgggtatgctccgtatccgggtgggggaggcggaggcggcggt

SEQ ID NO: 3066 - DNA, 14419 bp, Xanthophyllomyces dendrorhous
ggggaggcggaggcggcggtggagtccctgtcggtgcgccctgagcaggcatctggaagccaggagggggaggaggcatgtatgaccctgttgtttgaatctgggaaggatggaaacctggaggcgggccaggcatgcctccgttgggcacaaccggattcgggtatgggttcgagccaaatcttgaaagcacattaagacggataaacagatgagcatgcgaatgggaatcgtcagagaagattgatgtgtttgtgaaatagagggaactcacccaacgggcatcgagtttgcacctgttacaccaccggccatgccaggagggggaggtcctccaccgggtcttccccccatgctcacccctccgggaagcgcgttgttcttctttgcctgttgagccaacaacctctctgcctcagttccgtgtctctctccctttccgtccttcttgaatgcatactgcacggtgattgccttgttcattaagaattgattcgacattgcctcgatcgcggcatctgaagcctcgaagtcgttatacgcgatgaagccgtaacccttggaaacaccggtagcaggatctcgggcaatctgatggtagagtggaggtaaacgcgaggataacgacacaaacagcgtgtaagcagacaaattcttacagaccccatcggggaatgcagttattgattcatagatgaaattctcaccttagcttgctggctgacgataccaaaagtggagaacgtgtcgtaaaggagtctttcgtcgacattaggatccagattaccgatgaacaggttggctccgacatcaagctgcttcttgtcatatgaggcctgtcggtccagatcgaacgaagatgtttcgggaaacgcgtcaattatcacgatccaactttaatcaagattcgcaagatgtgtgtacggaggacgtaccttgttgaccctgatgggctttccataaagtttgatctggttcatgattcgacaggcgtattcggcatcctcttctcctaggaactcgcagaagccgaacccttggtgggcttgagagattcgatctttaggtagatggacattgactgattgtgcaggacgttgataccttggaagtcagtaatcaaccctatgtctagctatgataagaaagactcaccaactggtccagcctggtggtgtggattgagttatgtcgtttgtcgttcggaagggatggtttcgaaagagatggttgaatgccatatgatgttgaagagaggagccggaagacaatcttgtcagcatgagcattgacagacgataagaaaagaaacgcttggacggacctgaagcatcagctcccaaaccagagcatccgtacatctctcgtcaaggttaccctgttcaaacaaaggaaacagcggtgagcgtctatgtatcgagagatagagacatgtacaagggaacaggagtaaaaaaaaaggaaacaaaaaagtgaagaaaaacccataaaatggacgaaacatgacgacaatatgaaaataagactaaccagatacactgtggcctcttggtttctatcgaactcgtgaggtgctctcgacatggtctaacgatgtccttctgtctgtcgggggatgaggtgagtagaagaacgtagtgcggttgagcgtcaaagaaaggattactatgtggaagaaagcgaccccaagccaagcccaagtgatggggcaattgaccccaaatttgcccaagatattgggtatttctcagatttacccgtgagccgtgttctgccttctcttttctctctctcctctttctcttcaaccccgactcgtcccaaacaccttcgaccttctttcgttttctttatcttctcaatatgcgagttactttgcccaaccaaggtggtatgcccgagggtatgtgatcgacttgtttacttgctcttttccgcagatcttcacgattcgtccggacagactctcaccgttcgtccttgtcttttcggtcttcccttattggcccttggtccttcatcgatcctcatctttgtaggaaagaaattcgtaggtccctctttttttcttcgcttctcgatctcttttatatgagcgacacagagaaggcgtatccgttactcatcttgacatcgatctgatttgttttgttgatgtggttccactttttttcctatccttctctgggtgggggcgatcctttttttctctttcttctcgcttttgacctacccaacagctcggatggtggggagctttcggtggtgagagacagaagggtatcattacctactgtacgtagcattcgttctgcaacaatttgctcctcctttccttgaatttgaagatatactaactttgttcgcaccttcgatctcctgctatgcttttctccacagctatctcccagaacgagcaggccgctatgcgaggtgctttcgagggatacatcttccacggtttcaagcgaattgcccgacacgctccctacttcgttcctcctttcgtcgtcggtaagtaaacgtttaggaaaatcatgatgtgaacggactaggcagtaaatatggaagatcggagcatgtttggctggtttgtttgggaattgggcttttgggcaatgggcatagagatcgagcaaacggaatgatgagtaaagagtcatactaagaaaccttcgatcattcgtatcttccatccaggttacgccgcattccagtgggccgagaacaagtacaacgttcgttctccttcgatctgtttctgtttctttgtacctgtgtaaagactgacgatgtctccttttacatatcgatttgatcttcgttttcgggtgtaccctcaatccaccgcctctgatcctcccttttcatccttatgtttgattcgaccaccatattctgcctcgatcggttccttcaaccaatccacatcaactatcattaccctccgttcatgttgttctgcttttaatcaatagtacctttgctctaaggagggacaccacttgaccatgctcgaggaggagggaggacactaaacgatgtaaaatgtgttctgtagtagacggtgttggcattatatttctctttcatgatgatttttcttcttttctgctcgccgactggcatgccctcccttgaacaagcgtcatctccttacagacaaagtccgagtcagatcatattgagtatatcgagaaatgacagacacggagggttgatcacgatccgagttgttagaagagcgaagcaagacttctcctggtatatacgattgagagtggttgacacgatacatttggagagacgatctggacaaaatcgtcaaaagaagagtgggttccaagttgatagtgacctaaacactatcaactactgtcgtcacctatgtggtcgtcatagttgaggagacttcgttcgtgtataaaaagatctatctaccctcgaccaaggaacatcagctcagacatttccttcccgatcatttctttcgtgtttttttttgggttgcatcgagataggaataggctgttttgaatgcttgacttagattactcaagttcgtccgaagaggacatcaaaccgactggggtcaacggtcgtggacatacaccaaaacagaaacggaagtcgattggcgatttggatcccgtgtatgaaagagcaaatactccagcaaggaaaaagtaaagcctgttcatactgacgagagacgatgtactcgatggcagagaccatcagaatgaaaagtgactgagaaggaggaaagagaacaagatatcttgaccagagtgatgggtttggctgactgaaatgtatctggtttcatcataggtctgtactcccttcgttcgcctccatctcatcgatacagtgtgagtaccttctcgtgcactgcccgatggaagaaagaagggaaagaacactcattgtctttctctccatgtctccaaccggtccggcgtgttttgctcttcttgtgatggctatctcggaactgatgtcaacggcttctcttcattgtgcatcaagtagagaaggatgatccagcacaataccaaggtcgaacactcgctcgaccaaaagtccaaggagactatccaacgcatatttatctatcttgtgagctgagatcttgtaaactcgctctgctgtcctatccttgcggtaaagaggaagaggtggagacaaagaatgacaaagaatcccttggtttggaaatattcaagtcgacatcccacctttcttcagaactctcgtgaaagaagcccaggccgaccttccagaacttcactccttgctagattcgccatcaaataatcagccaccgaccgatcaggccgagctggatacaccgaagagagacaaagagaaggaaaccaagttgcacgtctcgctttctagaccactttatttgagagcggatcgaaagagcgcggtagaggcctcactgagagacgtggttcggacgatcaaatcgtcagtgaccctcattcttctcccttcatctaaaagacgtaggctctcagccgtaatgccacgatattgaacgcgaagagtgatttggaacacgacaagtctggtgcgcgagtgctgacaagaaaccctgtgcgctctgttctcttcgtcctacgtatcgtaaccttcttttccttgggacatgcgaaacaatatcaggttcccactttcattctcgactctcagcgtattcaaaaacgatgacaacacaagaacgttcctgagtatcgatgttggcgctgggtttccagaagtatctcttcttgctcgctttcctttcattctctgctcttgatatttactgactattctcttcatctccgttctatggctcgcaacacagctggaagtgttgacagaatctctcaataaatcactcgacaaacaccatctaccaccctactacacttctcctcgattccatacttccatcgcctgggcgctccttacacctagctcaaacccgtcgtcgcatctacctaaatccacactgatcccctctattcaacatgaccgatcgaacaaacccgatcaaaaaagtttcccgtcgatcgaggggatcccaccagatctagttaaaaaattggatgaaaaattcggagatcgcataaggaaagagggaccgtggctagtagacgaagtccgcatgaaagtgggatcggagatctctgtgttcccgctaatggggtgatcgagctttcttccgtcctttttcgtgcatcaggtggtctgttcgtataaaggcatgactgaaatcgcccgacatgttctcggatgattttctctcacatagaagaataacgaggcatggcgaatcgtgaatgaaatttcctcaaccagatactactatagaataggccaacggagggggtgggagaccaggagaacgtgagcaaacgataaatgtctgcgacagatgcaagatgagaggggtttcaggtgaagaaaaatctaaactttgtgatcaagaggttgagcaagaggaggaaaggaaaggaaatgttcatggggtatgcaagatataaaaagacagcatagaaagatgagaagaggagaaataacaagataaaaaagaagtcatcgatctagacagcaccgcattccccctatgatatcgagagtttcagaattagacgaacgaaagcagaggatagagagggaaaattgatgtcaacaaatgcttgattgtcatcagtgtgcgtcggtgaaggaatgaactaacgagaagtctatttccaggcttaggagcattgtcggtcatctaatttttgacatcaatcaaacagacaggtcagtattgagaagttttgagggagaggaggaaccaaagaatttacttgatcccactgttggaaccataacacaaagatatatgtagataagtacaaaatcattggaaagcaactgaaggtcaaaatcgatttcagacccagaagagagaacatacagtcgtcatgttttgattggtatacgcgtactcgtatcgcttgatgtactcggctgtcggcgcatcgtccggatcacatccaatcgctttcaaattcggatcctctacacaaacatacatgcccaataacgaatcctcataaaggatcagtctacgacacagaaaatagtttctttctcgtgacgactttttgcttacggtagactcgaacgtaatcgatgttcatcttaaccggccacatagactacacgaagcggtaagggtcaacaaattggaccataacttgaaagtttacataattagatacaaaacctagttattgcgcttacctcaagcccttccatgtcgataggtccgaagttgtacgacatagccaagttgaagatgatgtactgtgacccaaatttcaagttgatatgttctcagacgatatccttcaccacactgagaactaacttggcaaaggacgagcaagaactgaccataggctcataaggaataggtcggttgcccacctgcgtctcggcgttgggtcccataccgccctccagatatgtccaatccctgtatcaagcatagggcttgctatgaataaatgactggtaaacgaggatataatctgtaaatcatttgttcttacaatttgtcatcgttgaaccatttgatgtatccattctcgccaagtttgctgttgtcaaacagggcgtgatagcatgcagcgtttagctaccgctacgatcagttctgtttaagagaaagagaagggacatactactcaaatgcgtaaacagcgtaacatcctggattaccatcagtatcagtctcgtagcaatcctggttagtggttgatactccggagatggtctgctgataagctgatgaagtaagacaaggtctgagttagtcttctttgtaaccgaatcgagagcaaaagacgaaacaaaagaaagaagagaagagaagaagggggccgtacgtcctcctttgtaagaattaagatgagtgatgctctcgtcctcgatgatcatgtgggactcattcagccaatcatattgctaaaaagaaacattcagaaggaagtttaagcaagatcaatcttggaagcggacaagagtaagaagggctaattacaggattatacggagcccattgagcggacagagacacctccccttgagtgatagaataatagaattggagcatcagttacgattcacgaatcaaccttaatgaaacataaggggaagaacctgttcgggaagccatatgaccttgagcctgagttcagacaaggcgaccaaggaccatcatcacaagagatcaggtcacgactctatcgaaggcggtttcgatcgatttgaacagtcgcttacctcaaatacatcaatctatcacgagatcgaataaattcgtcaacagccattaatcaaaaggaaaagcaaggcgaaatcaagcaaaaggatacttacctcaggcgccgctcttcctttccaagttccgtctgggtgttttggtccaggatgggtaggatcatccgggcaggtgcatctagaaagccgctggccaggaaggtaggacaaggcgtaatcggttgcttcgtccgttccggatgtaacagcaatttctggaagaccgttcaacgtttggttgggtaaagttccgacatcgcaagaatcataggtgtatggccatgttccatccagcgttcctccataaccaactcggccaaggtttcccatcgcccagaatgcaggccaaagaccatatgtagctgctgtcgcaggaagtctaactctggcttctagtcgaccaccttgaaagcacattttgttccagccttggatggatccaccggcgaattctaaattatggttgtcctcaggatcagctttgtctaagctgatctcgagcgtgccgtcacgcgtagttaccattcttggatcataatactccagatcgtttgtggcccacgcgtggagatcctacgcgcgcacaaatatttatcaaaaatatgagagaggtgtcgcaggtgtcggccatgaatgatacataggtgagaaagaacgagaaagattgtgtccggaactcacgatagcctcccagaagggatcgtctccaggatagaaggacctgccatcctgattgaattcatccgagaattggagttcccacacttcacctgagtcagagatgacagtatatgcctcttcaggagtatctctgtcgattaatccaaaatctgccgaacacaggaaaaaggaaaggtaacgtgtgagcatcatatacattgaacgactctcatactttcatctgttctgtgatatcaagaaggtatattggactgacttcccaccatctgtggcacttgaccttatatttcacaaaacaggcaacacggaagatatatgagcagtgggcagaaaggatgattccttttccttgtagtatcgtacctgatccgttgactcctcccaagctgcgtaagagagaagtatcagactctaattcattggacaaccggaatggtagaaaagaagatttgccacagcttacttgaaggcgcctagcataacaggattgggctttatgaagacagtaattaatgggtatccggcgctacgtattccaaacaaaacaaaaacggattggtacaatggttgttgaccagacggctacataactagcggctcttacaaaagctaaaaatgcaggaaataaaagaagcggattatgaaatcagatcattgtcttgactgaggaagagacaaccaagtggtggactaacggtcaacacggccaatgatagcatgaacaaacagccgatgttcgccaaccctcgtgctgtcagtatcgtgcctgctccgcgtttatcgtgctttgggtccggattatgtaagtagtctgatttggtaaggatagtagaggaataggagatttttctgtgtaaacaagcaagttgccaatgcgaccggcgacgatggtgagaagaacagaccgtctgcttccacatcgttcacccatgtccattctgaagggtcggaaggaagagagtactatcaacaggcgaagagagcatgttaaatttatgttcaaactcatttggcggccaagcccgtccgcgcgtcatgacggatcaagaaaataaagaaacgaacgatttcagagactgttggcttggttgaaagagacgtgtccaaaacagagccttgagaaccactctgatagcttgaataggatctctgttgaaacgggtgtgggcaagatacattcatcggcttgagccttagacacgagcagcacataagtgaaaacgaacctgggtgtgtcgactgctctgggaaccctcgatgagtacttctgagctcgtcgaaatgtctctataggagaagccagaggctttcttgaagctcataacgctacgtctagagagaagagggtcggatgtgtatgatagcttgatattctcgttgttgataggtaacgaggaacttggcagtatccgtaagaagtatgaatcagaggagactctgaaaatggcgttcttgagcggttgttcgagagtagacctgctttcgatcgaacgaataaggatagaaagtgatggatgttgaggttaagcaagagaatgatactctcgtgtctatgtcggaagagcagatgtaaaccaacacaagaagaaagagagagggattggaaacagcaacagagtgatgttttgatgctccttacgttgtttagccttccaagaaagctcgcttgcctatgttattccaaccataaacaaaacgaccaagaactcgtcggactaggctatgtcacccaagagtaggacctttgaggtagatcgcaaagcttgggtttggacttggccttttacgtaggatctctcggggtttcttggcaaagagaaatcgatcccttttttttccttttcattttcaaattcaagcctgagcagcgttgattagttttcactcggcgcatcagttgcaacacagttagcttatccgccatcagctcagtcaatcagtcagattggtgtgagcgaagatgatgatgatgatgatgatgaagaaaaggtcagtttagaagaaggcgcaggtaggcgacaagcatcatcgccgttaactgggcagaatattatacagaatgttgtattttcttgggcctaaatgcttgacccgcggaacattatattctagaatttattggcatggccaacgggccaagccgccagaagctcttggttaagctttgtatttcctctcatcgctaacgaatttcggggttctttgactctttctgttgaactcaacgtgaacaactggatgatgcggacccatcagatgaagaagcacacacatggatcgtttatgaggtgagtttatatatagtatatttaaggtggataatgaacagcaaactaaatcgtgacgagtgggggaaaagtgtacaagtagtgatggcagaaaaataaggcgttgaaagaaacagaggaaaagagatgataaaataatacggtgtctctatcgttgagagtttatattttttcgttcaatctatagactatgaatcaaacggcgccaaagcgttgccagaaaggatccgacttgtcggtatccggatggatctggactttccctcgccataacgccacgctactcgcactcggatcctgtgatgggttgcccaaatcgttcgaactcggttgccaaccggctcccacgctagatgcgatcaacgttggtaccatggcaaggagcgacattggtcgaatgtccttcttctccatcatggccgaccgcgacttgaaagccatggaagacgactggagtcgacctcctcggattgttcggtaggtcgacaagttgtcgatcgtcttagtgatggcctcattccactcgtgctgctccgcgtcagggttcacttttggtagcttgctagggtccttgtagattttcagcgcataaagcacctttgcgaaaggctcggtaggaagcaaccggatgatgacagccaagggcagcgagagcgcaccaacgatgatactgattgcccagtctcgaccggtgatcctgacgacctggaaagcacttcctccgacgaagacgatggcgatctgacctccaaccatgatgccgaagatagcgaagaagtagtagtttcggaagaaatctcgtgtaaagatgttcaactttcgatcgagccgtcggcagttgagctggttgaaaatctgacagaagacaaaggcgttgaacacgatggtcgagacctcctgttgctgttggttgcaagtcaactcatcggaacagacgttgttgaggatgtctcctccgaggaagtgaaggatcaaacaagcgatgatctggaacaaggcctgtccgaggatcatcttaaacatgtcaattgtgatcaagggagccgtctttggggtgggctttctcagcaaggaagtaggcgtggcgggatcagtcgcaagggcaagagcagcaaaggtatccatctaaacaacacaaaaacgaacagaccaatcataaccccagcgtgagatttcattcttagtcataaccatgggaaatggaaaaaagaagatgacgaacgatcaagttaacccaaagaagctgaacggccgtaagcacagactgctcgtcagcagaagcgacggcagaaacgaaggtgataaccacggcggtgatgttgacagagatttggaattgcaagaactttgagacggaatcgttgacacatcgtccccagcaaacggcgctgacgatggacgagaagttatcgtccatcaagatgatgtccgaagcctccttggcaacctccgttccggcgatacccatcgagaacccgacatcagcttgcttgagtgccggtccgtcgttggtaccatctccggtgacaccgacaacctcgcctagatcctgtagagtagcgaccaatatcttcttgtcctctggagaagatcgggcaaggacctgaagtcggggtacgatggcgtgaaggtcggctcggctcagttcccggaagaccggtccttccataatcaatcctccaggagtgtagattccacactgggtggcgatcgaccgagcggtcaacacgttgtctcccgtgcacatcttgacggcaacaccagctccagagcatttcatgactgattcggtgactcccggtcggagtggatcttcaataccggtcacagcgagtaaagtcaagtcccgggccaaccaggtgaacgggacctcgccattctcgtccatatcggctgaaggccaggactcgatatctcggtagcagatcgcgatcgttcgaagcatgttgttggcatagagaatgatggttcgctcaatgttgtccctggtgtcctcggtaaacttcttagtctcgatcttgtcactcgagatggtctgggagacctcaagatagctcgaacaaagccggagaagaatctcggaagctcccttgaagtaaaccctgtgctttccattgggaagctcgacaactacacccatagattttcgctcagacgagaaaggcctataaaggagagaaacccgaataagaaaagatcgttcaattgaggaataacaagaaagaccccggttaaggggaacaaggtttgaggtattcaattaaaagacgtacagcatctgagagatcttggcagactctcgagtagttttgtaatccttccaacccagttcctttgcgaaccgaagcaatgcggtctctgtctttgagccgacaaagatcatctctccagactctggatccttatcttcgaacgcagtcgagttcagaacgatagcttggttgaagaggtcttgggtctcttggttgagaattgtgttcagggtgctcatctccaatgagaagtctcgtctggcctggaaggaaaaggtaggaagatgggtacgttgagcactgttttgttttatcttttgcgtaaaagtacgacgaaaaatcacacacctcctcagcgttggttcgtccctggttctcctcgagccgctggacaaacttggcattgattccaacagatccggcaacgacagacatggaattctgagtggcgaaagcacaagaaagagtagaaacgaaaaatgtttgttagcgtcttagacgggaaaatggtcggacgcgcaggaaggagagacactcacctgggtgagagttccagtcttgtcggtgcaaacaacagtagcgttacccatggtttcacaagccccaagtaatcgaactagcaagttttctttggtcattcgcttggtggcaaaagccaaggcaagggtgacggccaatgggagaccttcaggcacagcaacgacgacgatggtgaccgaaatgatgaggatatcaatgaaagcatctcctttatcagaagccgatcgaggggggttgcccgtcccgagttggacgaagaatcggatcatcaatgacgaaaacaggatcagaccagccaaacttccgagttttgcgattagctcggctagagcgttcaacttgagctggagcggagtagccggggtatctccacgaagggccataagagtccgtccgttgaaggaattaggtccgacagcaatcacaaggtactctccgacaccctccagaatctttccaccagagaccatgaagcaactacaaaccccaaaaatgaggaattagggtcggatgaaacatagaagtcagagaacagaaaaccaaaagagaatgggcgtactcgtttttgaaacccttctcggtctcttccttaccctctctttcggccaagcattcctcgtaagtgacctttttgatggcatctgattctccagtagcaccagattcatcacatttgacggcgtgtcctcgcaagaagataccgtcgacctgcgaaacgaaagaatatatacaataaacaggatgagagaacgctcaaggcagacgaggcagaaaaggagcgagcgcattatactcacaggcacgatctctccaggctccagaatggcaatatctccaacgacgacttcgtaaacactgatgatttgctccctgccggatcgaatgacttttaaacctcggtcctccttttgagcgttgagcttctggaactgcttctctttttgccactgagaatcagataaaggagacacaggtaggagagttaggaccgggtatttgtactgccaagaatacagaaatatagagacttacatcgttggtggccccaacgagagaaaccacagccacagcaaccaagatggctactccctcaacccagtcgacggcagggacttcgacaagttcgccttgggcgttcaaaacggttttaggcggtcgacccaaatcagtgtatagtcccaaagcgagcgaaatcatcgcggcaaccatcaagataatctgtattgtacggaaggccagcaaacgggagcatcgtcagcaaacaaacgagatagatcccaagac

SEQ ID NO: 3067 - DNA, 40839 bp, Xanthophyllomyces dendrorhous
agatagatcccaagacggtgtggagagaaaggaaccgccatatacgaaccaaaaccttgtccttcagagcgagccagaccaagtagagcaaactctttggcttcttagaaggcagcgtgttggtaccgtaaacccgttttcggtcctgggacgtagcctggacaactgtgccagttgatcctgctccagaagaggcaagtacagcatcatctaaacctttggtaggatgagtaccaagagcttcgagcaccccggctgtccctccaaacgactgaaggagaggtatcgatttactacaaaattcaaagtggaaagaaatcgacgatgtcagttcaaagaggaagaaactccgaaaacacgcgccatgggaaatgacatacggatcaaccaagcttgctaatttcttggggaataacgtgaacggtccaatatcttcggcgctcgccgcctcattttcgacatcaagcttaaactgagcctcctccttctcgaccacgtcctccatcttgccggtcttctgttcaaacgcggttttctcggattggttgatgaatgcactgtccgtgtgggtgtccgagtgatcggccgctgtgatatcagagacccaggtagcgtttgaggctcgtcgtctgtgatcggctcgatcgtggtcgaccacgtcaagcgtgccttttccagagttgacgtccgggtggttatccctcaatacaagcgaggtatgcgctgccttttctggtgtactgaacctgacggacgaagcggagagcgtaggggatgcaggagagaacgaagagtctgcatcgttcatagcgtcgctgggcgagagattggccggatgggatggcggagtgataggaggaccgagcgctgtgcgacgcgacggcggtggttacgaaacaaggttgggattacaaaccaaatatgatgtaatcgtcagcttcctgtgtgaccctgatttacccgtccagggggagggaaacaaaacaaatatcgagattgcaacaccgcctccttctcttttttttcttccgctcagaagcagctagtaaagattcttccttcttcgtttgctatcttttctactgcttgtgctggattgggatgatggcatgtggttatgatgggaagacgggaaggcactgagcacggtcgtgctccatcgagaggggtgcgcaattgagtggaagatttggtggggatcggaatggtcatggaaagatgaaacaaggctccgtctagagagagaaagttgcttaccatactctaaacttggactggtgttgaccgaggaactgaactcgtccgcgtcgggcgctgtggtggtgatgatcaagggaggcagtatcggagctgacatcttgtggaaaagagagggctgtagttgtttgaccttctacaatcgagaacagggggccttaatgaaacgagccacaggctgtttgagaatccaagctcttgagaggatggataggatgatcacgatatcgatgcaggtcgtttaacaaatttataggagaacggtggtggcgagggtggtttactttgaacgggtagatcgatgaatgagaagagaaaaggaaaggaaaggaatcaagagatttgaaaggagacaagaagtgtatgttaaatgtttaaggagaaatgggcgatcggtcgaaggctatgtcagatacaaaagacccgaaaactacaccgcgggaactccattgaaggtggcagcgtgatacatatctcaccgcccaatcgttcgtctaaacccagaggtcgcttatagtttcagttgtactctgtcttgtacgagttcatcttggcaagtgaacacaggcatgatcttttgttttgttttctttctatctttctgtctctttactcatgatttcttggggttgaaactgttagagatattagcagtagtcgctggacagcctcataatctcttattcatcgatcagacccgattgccaagcaaatcttcagtaacgcattagtattacctactatatgtccgtcccggtccatgaccttcacgctttctcgatctccctcttgctcttacaaacatacatacgtatacatcatatcagattctctcgttcccctccaagcacgttctaaattctctggaggacggcaaatgtctgtacacagaagaaaaagctgtgagaggatgagagggctctatcgttccgaccatatgtttttctaggcaaaaccttcaccggtgtttttaacgtcattcgttacgtgtgcttatgcggccaagggttactgcaatgaaataacagccataacgaacagagctcatctccatacgactatagcctgagatacaacagacacatcaacgtttgacccaaaatactccggcaccgcccataagacgtcaaaagactgagttctcagaactttgcactgttgattcccgccaagaacacagcctatcagcttggagatggggaacttgaattgcacaggctgagatagatagcttactgtggtaagaactttccgttcaacgtgattttcacgcggtctcctttaggatcctgttcccgctcgacttcggcgtggaaatcaaccgcagagatgattccgtccccaaactggtttttaacattggcaggccccggcaaggggattgtaacaattgttaatattgtcggtgggaacaccgctttcatccatgatcaaacacacaaacagaccttttcattgatgacgtgttctgtgagtgtaccacaaaagaagaaaggatcaatgaatgtgctacctacgtatcagctataaaatagacatctagctagaacctactcaggggatatccatagacgaccatgatctcgtataatcgatatagcataggatccttcggaggtgaactccacagatctctgccaaagtctcgtcgacaaagagaacgggaaacaaaaatacaccccacctatgagtcttacggccttgatcgcgccccgtataagactgagaatccttaccctcgagatggaaagtagccttcacccatacccgtgaccggtttcatcaaagcgcttgcgacatgacctccgagaacaaggcctagcttcttgaggtcctcctcgcttggctttgctctgttgtcaaaaacacgaatcccaaaaactgagggtcagtgaatgatcagaccgctctctctttcccgaaccgaaacgaaaatagcctcttcatcacatactgtccatagaatattgcggccacaaagacctcgctccggtccattctgctggcgatctgctcaaaagtcagttttgactcagctttggctgcaagaagtatcttggaaatttctgaaaggttgttgagcgacattgttaagcttgctggtctgatggtctaagctcagtcctaaaacatcgagtccaactggttcttataagatgtaagagatcacctgggtctcattcggctaaccccgggacggtgaatgaacgagagttggggtgagagtgcgtaaccctaacaacgtcaacgcacacaacaccatcatcatctatacactctctaattatatcagacatagatcggcttcacacacaacctctcgtgtttatccgccggagatatcacccagatactccctgatccaaacatcaaccatctgtcgttaagatgtcaccgtcggcgatcacccggctgtcatatttgttgatttatgccattccctcaccagaagaagaacgggctgccagagatgcgttcgctgacgaagatagccaggaggccagccaggttcttttctattactctacaaggaacgttcaaacaagagacaagatgctcagacatctagggcttgctaaaggactggaaaactttgtaaggtagatcctttctatccggtttgatagaccaacaagagtcctttcatcgtcaccatcagcagtagggcttgcaggctgactgccggctgatcgtttggtaaccaatccgattccagcatgtttgatgtctcgacggaaccgactctgatcacctccatcaaatcatctctggtgacagtgtccccagaaccaggatactatatccatgccgtaagcagcgaaagagtctctttctccttcagtcgggctatataaaagaaaacgttctcatcaataaaacttgtgggtgtgtgcatgtctacagaatgtcaccttggactcgtcaagttcatcgtctctaaagtcaaagaatcctgctgatgcagctgctccgaaggatatccctgctcgagtcattgaatcatatcttctccaaacatatgagacattcaaggtacgagacttctcatcttgaatgagatccagggtgtgtcgttttgactagaaattaatgtcttccttcttgtccatgtttcaatctatggtcgagaaatgtattagcttctcaacggaccgatcacagccctggacagcctttacggaaggaaagaaactgagagaaaaatcgaacagttctggaccacttcactctctacatgggagttcgagctagaagcgggtacagcgttctacttggagaattttctcggttgtaagcttctctcctcctatatccctatatatccggtactgttatcgatgctgacttggaaagaacatcattcgtgattttgaagctcctttaccacctttgtcttcccatccgccatcacaatcatcttcctcttcaccctgctcaatcttactatctcgctcgcatatccatcgtcgcgatcaccctgttccgttccctccatccctcatacacacccttctcaactatttaccacccgcaccgcgcgcaaatcccataacaacgaataacaaatcaaagtcagccatatatgaaacccggaagagtttcccgttggactggggagctaaaaccttgatgcatgggataggaatccacacctggagatctaccacgcctaccgagacctcatcaacttctaaaaacatctccagtccgaccgaagacacgaaagagacggcgccgagatcgaaacattcatcctcgagatcatccttaggaggacttggagggatcggcgcgttttttctacctaaagaccattccacccaacagcagaaccagcaacaggagatcgacaaaagacggactcgatcgacaggagctggttcaggctctgagaaagcaaaagacggttggaagtggcttctcggtgaaagtctaggatcggccatcggcataggaggatcaaccacaccttcttcaagttccaaggtagccgctgctagttcaaagacaaacgaggcggcagaggcaaaagacacggtggagtctgagccacaaggtgaacacatacatgcggatgtggatgtgaacaaagaacgagaagatgatgttgacccaaggcagatcccattgcccggctcaccacagatggtagaatccgcgaaagagataaagattgacctgttgagcgaggcgatggagacagtgctacctgtccctagcgtgaccgagagctcagaagaagtagaagatgaaaaccaggctgacgaaacaaagatagcagaaggagaagagaagcaggacaaagagacagtggaggaagagctagtctggagagatctcaaagtctggctagatcgagatgagaacggtacggaagagcacattgaaggcgaaggagagaaagaaggaccaagggagtctgatcttaaattcactatcgtttgtcctctttctctacaatcttcttcgatgcagctcaagctaccttgcctctatctatctcactcggattacttactactgtccgctgcttttctgtagatcacatttccagaccagaagacccttccaatcttatacgcctactttcccttcgacccttccgttcccgcactcactccctcctctttccctgtaccaataccgacgagatctcacatcatgaagtcataccattcatcccgtcaatctcctcgtgcacatggtcagtcaaactcggcaagcgcaaacctggttgggcttacttccggtgatcatggagtctggaggacagacaagtcagaggcagcatgcatggaagatgaagatggtgcagatgacggtggcccagcagcatcagccacagccacgaaagacgggaaggtaaagaaagatgccagagaacgaagtttgttgaggagtttggagattcttagatcgtatgttttcctcctgctccttctcctctctttatgaggacaccaaagtcgacatcaaacggtctcgtccgacatctaatttttttgtttatcttctccttctcaacccttgattcgataacagagacgagatgattcaagagaccatagctcgcacgactttttcttcctcttggctcatcagccggatcattccttcctcctcttcctctccttccgactctgatggacctggcacacacgcgaatgacgttgcaatgccagtatcaagaaagaaggatttcgctgagaataggaaatctaccaacagaagagagttggtgggttcggttgaaggaaaagggatcacattgggcgacttggataatcatctagccacttgatcatggtctttttcttttcttattctggttgattggaggactaagaaggaaagggaacaagaagcagacagaggatcatctgatcgctcgcgacatatcagagaaaacgagaaacgataaggaaaaaagctagggaggggaagagaaaaaagaaagaaagagtgttcaaagtgggtgaatcgggtgtatttgtgagagaaagagaagaaaaaagtttgcacaatgagaaagaggttacagatacacgaattgaattcgatagagatggcaagggaagaagcgatagctgaggagcggggcgtatgaggacgagggttaaacgaataatgacaagcaaaaagcgcagaacgaaggcactacagttttgttgaaaagagaccgatgctagcatctcaagtagacttgatggacacttccgacaagatcctatagaggcacgaagaaccattttcatcagttttcagcgctgaacacttgcgtcctatgtagaaagaacaagaaagaaataaaatgattggacctacttgaaagcctccttgtaagcatccaaaagagccttaacccgagttcgctcggtaaccagggcttcgtcctcgaacaacaagtttgcgaacagatctggtttgtaaaggttggttaccaatctagactggactgattccctcgaaaagttgaccaaaagctagtaggacggagaagggtgggtggtttcagtttcagttgtagaaaagtggcggacttttgtatgaaacgctgatagaaagagataggaactgacatgcatgactgcttttggaacgagatcctgaatagtttgacgaacgatcgcaaagtaagagcaaatcaacgatcgaataaggtttgtctccatctcttctcgcattgacagctggggctggtccgggtccgtaggcgccttttcccaaatcggagacagagagagtacagaccaatagagataaggcatgaacgaatcagcaaacagaacaattgaacacacatacacatcgatcgaaacgagaagagaaataaaagctcgaggtacataccggctcaagatgctttcctagacttctcatgtcaaaggcggagccaggtccatcaaacgatcgagttccagacacccttgagtccgccctacccgtcaaatcagggaaagtatccgacgcaccccctcccacacctctaccgactgctccactgctagtcgttaatcctgatgaaagtaatgaggctggtccagcggtggattcacccggtcctccgggttggccaccgaaaaagtagttcatgaacgaatccttgtcctttccaccaggaccgccggccgctccaccagaagcgatgtgattcgaggtttgagataggatttgactcgttcgctcagaggatcgtttggacttttcagaatgatgatggtgccctcgagttccatcagtgggcgtagccgatcggttcttaattgaccgtcgttcgtgctcggatcgatgagtcgacgaagcaccattcagaaggacgtcatcagagtcaatgtcctgggactcggcccctgggtcagaagtcacagaaggcgcttggggaggatttgatgcagcgacagctttttggtgaccttgctgagcgatctgagcagaaccagcaacgaaggctttaggaagacaacacccaagaaaacatgacaatcagcaagggttttcagtaggttgaaagactgatatgagtcgatgagggattccataccaggatgattcgtattgatgtatgctgcctggatagagatcaaactggtggtgtagtccgaggtaggaccaagcctctcccgaagtagctcagtgaccgtctcgactaactgtgaatgaagcttagggaatcgctccagttcctatatggcaaaaaataacccaacacacaacacatgagtatgaccagtgagaggaaatatcttataaagtgaacaggcacatacgggactagtgcaattatggcaaatcttcattaactcttcgtataccagctcgacacatctcaaactgggcgcctccaacaacttgatttgaggtttcaccagtaattcgaatgcaacctccggtacaaacaaactcggcctaggtccggtagagtttctgatggccgttctgatatcttgggtcgataggttgttcgccggatcgatagattcgagagctcgaccaaagacatcgtggaagatgtaataaatcctggcaccaccacacagttctttggtagaaatatcgagagatgtaccatcaatggcggcaatgaagtctcgggcaaactcagtcatgagtttgaggatgagagaacctcgatgctgttctcctagatatgacgcatcaccgaacgagttgagctcctgctgggtctggcccataagggtattaagtctagctttcatatccggcaacttttctctgatatggttcatcagaacctatcatacaacagacacaaaagattcagacgtgtaagatgtctcatgacgtctgatggatatacggaaccaagatatagtgaattcttacatgattcagctgcttggctagatatctagttccgcatttatgagcgaacgttctataagctccatgtctgttgaagaattcttcttctttgaggatagcatccctcatcggcaatcgattattgatgtcctgctgggatcgacagacgattccaatgaacccaagtttgagaggatagacccttccggtcaggatgtcagcagcattggtaccggcatccatgaggtcgagtttggtaaggacaccgatggtacgaagacctcgaggatcaaccgatcgggcgagtttgagagcatcggagttggccaaatctacgttagcaggagagacagcaaggatgactctgtgatatgacgaccgagacgaagaaacggttacgatcaagtaataaaaggacgatatctggtgagaataagacaaggcttacgagttcggtttagagatgaagtcagtcacgagggttcggatctacagacgcatgttgatcaataggcagtcccaattagtcaactggcttcatacgttttcgacgtttcttgaaaaactactatgacgtacctgcctctctatatcgctaggctgatctccaaccgggatctacacagaaacggacccgatgtatgtgtgatcaactttgcaatctttcacgcgagttatacatgagggactgattacataccttcgtcaatcccggaagatccacaagggtaagatctagcacgccgggtccatagattttcaggtgtataggaagtttcgagattccctacagattcccaattacgttataacatgacagtaaatagcaattctacttgtgaaagactcaagaagaggctctttctagtcaacaagatattgttgagagaacatcaaacccaccttgttctgaccggcgactctaaaggtctcggcctcgatttcctttcggatctcttcaaaatcagtaaatcgcttgttgacatggaggaattctgcgtagtctgttccgccttctcccaacgtagcatcacctgcttacaaaaaagaaagggtgataagagccaggttgaagaagaagcgcgtgagtactagaacctggttctaacgtttacacggttagacgtaccgtttgcagccggtttgggagtatgaatcagttgaaggactaaaggtcgtcgagtgacgatcccctaaacgtagacgaagataggtaagatgaactgtttcagcaaggacccaacgatctcagggatgcagacacacaacgaaaataagaacgaacctgtcctctgggtaagaaatctctgccaacgatactaataaattccaaaccagaacccaaatcaaaccccaagcatcaccgccatccccacaatcatgtatcatcaccagtcgccagtcaacatctccacaccttggcatttacatttctctaaaacgaaagaaagagagtttggcttacgtttctaagactgaggatttccccgaagattgagatccaacctaatgttcaaagacagacgcaagagagaacaaagataaaaacaaaagaccaaaccacgaaacccatcagatactcctcttttcatctggcacattcaaaaggcatctcgagtctcttcttgttctcatctctagtttcgagatgacatattctcaagaaaagactactggagtaataaaaaatcaacagagggacatacaactacaatctgaggcctgccaacgaagagagaaacacatatttcatttagcttctgacaatctcttgaaccaccggcctactatttagaagaaaacacaaaacgagataaagaataattgtaaacttacaggtcgactgcatcacctcctatggcgttgaatgtatccctgtgtaacaaaaaagagtttccccaaggaatgtatacacgcatatacatgtcagacgatgagcggtttccaaattgatgctctcgctgtaggctctcttgaacaagcaatgcagagcggagcagataaaacataaggaaataaggtgagagagacgaactggagcttgttgaccagcgagattaaatctccatccatagacatttcttctgaagtataaattgtcgataatagatgggttaaggtggatgttgttggagcaagtgtctctatttgtgtggaggtttgaagtcgaaaggctgatgctggacgttcaaggaagggctgaaggtgtgcaactattctcagacaagggcaaacggagaagaaggcgagccgtccaagtgactgtgtgcttgtctgttcaagaaagtgagggtgagagtacgatggaaagaaacagagagggttggggttgagaaaggaggaatgaatggagaaccgcttgaaaggagctttgaaagcgctcgagagaaaatcgacttgcctgccgatagtggctgcgcgttgcacccgctaatctttcttttccttttcctttcctgttctactcaggtatatgtgttatgctctttcttgaacagtagattatgatgtattgctcttacaggtagacatagaaatatcgagtctggaattgtatttcatcaggccgttaagaatctattgtaggcatgatgggaaataaatgggttggtagaggaaaaagaaagaacgatacgacatcgtattggaacatgaagaaagacgaagagagaaagaaacaacaacccgggcgcttataggtgacaagggccagcatagacggagtaaaatcagaaaagagaagaatgttgacaggagacgactcgagaggaaggacagggaaagcgcgtagagaacaagatgaataaagtaagcgcaagagaaaaaagagaaaaaagacgagggtagttcacgtttaccagccctgttctgagaacaacaacgaactgatgaaaagaggggcacagattcagttaaagacgctctagtattctattaatacaaagggaaacgaggaaagaaaggtaaataaaaacgtacatggactctccgttgtgcgttcgcctgatgctctcggcgatcgtcgcactcacatcaacaacatcgagaatgtcgttcttgcactcctctgtcctgtgagtttgaggcagtgtgttggtgaccaccaactttttgagcggtaaatcttggatggcagccatagacgtctcggagagcagacctgatttgaatttttgagaaaaaggtaataatgaaaaagagtgagccgttgattcactgatttctgatatggtaagacatccaaacataccatgagcaatcaaagcccaaacttctttggcacctcggtcgttcaagacctgagcggcgagcgagatggttcgtccagtgtcaacaaggtcatcgatcaagatagcgacctaagtaaagcgtgatgatgtttccagagctgacgtcagtattcattgatcttggcgagttaatcagatgtcttcattgacacacctttcccttgacgtctccaacaagcaactcaacctccttcttctcttctccgtcggcatctttcggaatcggtgcctcgggttcgccattggccagctttttttctcgctttgctcgcttcctgttgatgagcgcaaagtcgagaccgagcctatcagccagggcggtcgctcgcttagctcctcccgcatcgggagagacgatgatggcgtctttccagttcgggatgttggtcttgatatatcggaccatcagaggctcggtaaagatgttatcgaccgggatatcaaagaatccctggatctgggaggcgtgaaggtccatggtgatgacatggtccgcaccagccacggtcaacaagttagctaccaatctgataaagaaggacgtttccagaagaaacggaacgttgaatcagctaagagaaagcaaaggaaatcgagtacaaagaaagaacgcacttcgccgtgataggagctcgagacttatccttcttatcctgtcgggcgtaaggatagcaagggataaccgccgtgattcttcgggccgatgcggtcttgcaggcagagataagaatgagaagttccatgagatggtcgttgaccttttgttcgagaagcaaaaggggcagaaatggcagccgagaaagatttcaagagaagagagtttatgaatataaacaagacagattcagcccagcattcatactcggctgattgttttcaagacagactcacgctcggaggactagggctttggagaataaacacatcctcatctcgaacggactcgtggatcctgactccaatctcttggtcggcaaacttagtgcattgagaggaggtcaacgggatacccagtctaccaatccaaacagttgtaaagcgaaggcaaaaaaaaggtgagggaatcaagcggatgaacatctctgagtatcctaacacaacaagaccagagctaggaaccaggcttacctctcggccacagctttagcaagctcaggatgtgagtttcctgttgtcgtttgagccaggaaatgagcatcggtagagagtccgagaaggaagagacgagggaaagtcagctcggctgaaactccgaagaggagaacgagtgagttgattatgggagaagcaagggcttaacctgtcaacaatcgaactccgtttccgctgtacatgattggtctatgaagagactgatagaagtgtttttgcttgttctggattcttgataggtgcagagtggatgaggagcaagaaaagttgagagacggttcgagaggacgagcaaaaagaccggagccgagtagacccgatttataaagtgaaaagttgtccggtaaatgtcaagattttggttataaaaaaaaacaaactcttgagcttaccttgatacaacttgtgcttatatccgcaaacacaacctagagacagaacgaacgttcaaagaagggttgtttggatgcttgatggtgcgtaagtgtgggcaggtgaggtgatgagagaactgatagcaaaaaaaaaagaatgaaaaaaaaagaaattacgcaaacacgtgatgatacaacaacacgtgattttaatcacgcagtcatcaaccgtaaccacccccatccctggtcgctcccaccgtctggtactggaacctccgaagagaccaacaaccgccatcagctttctcatcctcttccttctcttccttcaccgatcactatggcttcgatacagaaccagtttgctcgtaagtcttgtcaaaagaacgttctacggccctctttctttttcctttcgtatttccacaggtggctcctctgaagagagcaagcgactgccggttagccaactaatttactgaactgtttgcatatctctcctcttcctttctccttcgtgaatgtcccagttcgagcccaaaagtcaatgtccttgatgaacgcctcaccttcctacgaggccgttcccgagttccaagcgttcgtccctcttgttttcactttgtcatgtcatcttttggtaaacacctttagcgcagcgtcatcgacgagtctcaaagtttttgaaaggacaagaaaaagtcgaacccataggaaaaacccatttgcaaccaactgactctgtctttcattacgatttctacagtcctgaaggtagcacacggatcattcagtactctcccaatggacagttctttgcctatgctttacctaatgagtaggttccgttggcttgcccaacttgcttcaccttgctcattctcttgccttggtcgagacattggtccaactgacaactctcatactcgtccccatcactctcctcaacaacagagtcgtcattcttaacgccgacaacggctcacttgtacaatccctcgccgtttctggagctgttgagattgctttctcgccgaagggcacttacttgagcacatgggagcgatatggtccgttcttcaacacaaaagcgtctctctctctgccttcttgattaataggcctttttgtatctgcctggtccacatgagctcactttgcattcttcttgtctttgcaacacatctgctgcacttcgctgcacctggtctttgtgttgactctatccaaaaacagttaagccggaagaccctaacgcccagcacgccaacctccgtatatttaccacagccaccggtgaggaagccatgtcgttcactcagaaagctcaggaaaactggtacgtttcatagttcttttgctcagcgttgataacaaaaagagataaaaaaagattcaatcgccctctgctttgcatgtctgtcgaatacgaacgtctgacgccattccttcttacaatgaatcttgtattaaaggcaaccgtctttcccaccttccgagtctcacctggtccgaacattcaactccgaaatccttctcttccctacctcgacttcccagcctcttaccccatctacacctccgacttctcgattaaaggtcgatggtcttaagcagatctgggtgggaggaggagccgaaggtgaaggtgttgccgtgtttgtaggcgagaagaagggtgctccggcaacgctcagcttgtacagcattcagacccttaaaggatcttctcctgtggccaccgccaagaagactttctacaaggctgacaagatcactgtcaagtggaacagggccggtaacatggttcgtagcagtccaattggtacctatccactcaacatcctgatccaactcgtcctgaccctttgtgaactgcctttgtttcatcttttcgtccttccaggttcttttcttgacccagaccgatgtcgacagatcgaaccagaattactacggagaaaccaacctctacctgcttgctttgaagggtgggttcgagtgccgagtcgcattggacaaagatggtccgatccatgattacaactggtcacccaactcgagagagttcggtgttgtctatggatgtgagtctgttttctttagatgagatattgtatcacacaaggcgcgcaaacaaactaaaacaatcatgcctgcaactgtttttggaaatcattagatatgccttccaagactgttttatttgatactcaggcccgaccaatccacgatctcggtctttcttcccgaaatttcttgtccttccaacctcattcccgattgcttctcgtggccgggttcggtaatttgagcggaaacattgatgtctgggatcgaaagtcgatgaagaaggttgcagagattctcgcgcccgatgcaagtcattgcgcttggagtcccgatgggatgttcatcatgactgcgatcttgagtccaagattgagggtcgataacgggttaaagatctggtactgtaccggtggattgatgcacgatgagaagcactcggatctctaccaggtttgtcttttccctcgcatcttactgttttcacctgtgatctgtagagatgatatatctcactctctcatctccttgggacatttcatcacaggccatctggcgaccgatccctctggtccagactccttcattccccctgacgattcctgccgcgccagtcccgtcagtttcggtttcttctcgtcctgccgctccggcagcggtcaagcctacaggtgcataccgaccccctggtgctaggggctcgcccactcctacgctcttccttcgagaagatcagggaggacttcctaggacaaactctaatggatctgtttcgggtcctaacggtggaatgttgggtcagcaacatcacctcgggtcgttcaacaggaaccaacaacgaagaaacatccctggtgctccccctccttccaacgacggccaacagcagcagcagcagcaacgaggccaaggaggaaagagaggcggaaacaaaaaaggatccaacggtcagaaccaaggtcaacagagaaaggatgactttgtgcccaccccggtggaattgggtccagtcattgaggtcgccacggttgatccggaggctgacccgttggcgaagcgaattaggaacctttccaagaaggtatgttttctctctactttcgtctcaatttctgcacatcgcgaggaaaacgtagcgtgtattcactcaacgaacttatggattgtttcacggacaaacgaattacagttaaaggctatcgaggaattaaaggataagctcaacaaaggcgagaaacttgaggctactcaactttccaagatcaagaggtttgttctcggcctcctcattttcatcataattttgcttctgtctggacgagatgaacagtcggctgaccaaattgcgctccgttcctgttctttcattcccatagtgaacacctcatcaggcaggaattggcttctatcgagaagtagatcgtcgtacccttcccaaagtttgttttccctttgttctgatctagctatctagtcggttcctattgtcgaggtggttggtggtctcggtaaggtgtaaaatgtatgaggaagaggggggaagagtatagagaaagagaagtcttatatcaaaaaagaagaatgatgttgatgatgttgatttaaagacagaaaatgaggaaagtgacaaatcagaatttcaaaagtttgtgtgtgatcattgttcgtcgacatctagatggtcgtccagcaatacaggctgtaataatctctattgagacctaggctgtctatccaatagcaatcgtttttgtttttctcttctctcctatgatcctgtatgcttcgatgtgtggaatattgcgacccacaggattcgtctcaagggtttgagtctactcctgttagatcgatccgtctcatcaattcaattcaagtttgactttgacatcctttctttctaaccggatggagctcgatacaatcttcacagccgacgacactcaacaaaaaacagttagtttgtttctcccaaccttacgaacatgttcaaatgaatatggcaagaggatgtgtcggatgtcacttgtctcatttgatttggctatgtacatgttatatcggaccatattactgtgctcaacagagagcgcgtgattgcaaaatgtttcaataagaaggttatgaatgctgagaaagggtttaacaggtgtaagaaggttctccaggagcaggcatgtgctcgagcaacgtatcgttctcgtccactccttcctatcatgcggaacgaagtagtggggtcgggtaaggacatatgcagattattcagcaaagttcaatacaggaaggaaagcggaagagaataaataagcgtaagtagttcatcctggtcttgattcaatcgaaccgatgaagcatgtgaaggaaagacgaacctcaacctctttcagatccctctccacaaccaacttcggtccttcgaacatcctattgacaaccgcgcttcgcttcatggtctctaattcgttcgtcctgtccgcaaaccaggctttgagaatatcaggttgagtggttgaaggaatcgctttgaattgatccttcgtgcggcgaacaaagtctttcagagcgcgatgagtaagaagagaaagagatgaaccgatcagattctagacaaacgagaatggggaacgacgacacctacaagaccggaagttgtaggacgcaaactggcgagaagcctgaagagatgacctgtaaagcgtctgaagctgagcttgcgtaggagcagcggacatgtatgacaaacgagtgtaagtgagggtggatgtatgtatgtatgtatgtatgtgtggtcaaggtgagtgtcaagagtgaaggtgagtggacgcagttggatcggccggcaagaaaacgatcaaagtcacgtgacttttcgttcgtaaagccgttagaacactttttggttgaatagacgatcaacatctcggaaggtcgttggtcgtttggcacatacacacgcacgcacatatacaagcactctcacactcgcactcgtactgtgaaggcacttgaacacaggccgtcgttcatatggctccctcttcgacttccaagagctccttcaatggaattctaagtagtataagacatcatgcccttgcgtccctcttgctcggatggattgcctaccttcatctttccggtctctacttgtttactaaagggttccttctcactaggcttactctggacgagatcaacacctgctctccttcctctcccgactgctcaattacacccaggtttgacaaagccgtcgtactcatcatcgacgctcttcgtttcgactttatctcgcccaatccttcgtcgcccaacgatcccaaccatcatcacatcctcactcttcctgccgagttgaccgcttcggacccaactcgatctgtgatctttcatgcacactccgacccgcctactactactcttcagcgcttaaaaggtatcaccaccggttcccttcctacgtttgtagaagccggctcaaactttgctggctcagccgtcaaggaggattcctggccgttacaacttcagcgagctggaaagaaagttggcttcatgggagatgatacgtggctttcagtcttcccagatttgtttgcaaagaatctttcggcccctttcgaatcgttcaacgttgaggatcttcacaccgttgaccagggtgtcatcgataatcttcttcccctgatggaggacgtcacaaagaaagacgaatgggacgttctgatcggtcatttcctcggagtcgaccatgtaggacacagagtaggaccttctcaccagaccatgaaggcgaagttgactcagatgaacgaagtactcagaaaagtcgtagacgcactcgacgacaatactttgttgatgctcttaggagaccatgggatggatcgcaagggtgaccatggaggggacggagaactcgaaacgtccagtgctctttggttctacagcaaaaagccctcgtttactccttcaaacccgcttgcctcggttcctacatacacactttccggagcatctgttcctgctcggtttgttcagcaaatcgatctcgtcccttcgctttcgcttctcatgggacttcctatcccatacaacaacctaggatccatcatcccagaactcttctcctccaagcgcgagcttgcacaggctttcgatatcaacgctgctcaggtctggagatatctgcaaagctacaggaaggtcgtcggctctggaaaagaggccaaaaaggctgttgaaggattgaggagagtctgggacaatgccggaagggtgcagaatgatctgaaatcagcggaagctctgcccactccatccatcgagcttatgagcgctcagcaagcattccttctcgagactctcactcaatgccgtcttctatgggcccaattcaacacgtcttctctcctcctcggtctttgtatcctcctcctctctttgccgaccatgtggacagtctacttcgcgatctcccaggaacgatcgaattgggaacagtgggctcaacagaacttaggctctgctttttggggtgctcttgggggtggcatcgttggtggtctgagctctgggcttggatcagtgctaggtggtaacaaacaggatgggctaggaatgggtgcaactgtactgtattcggcggcattcgcttcagaattagcgattctagttccccagttcttgccgtccattcaggtcggtctatatttctgctcttgtctttcattttttttaaagctgagatacgttagaactcgtgggactgatggtttcttcttgcgctatctttacagactcttcgaaccaacattactcgatttggacggcctactctcttcagcctcatcggtccaatcattcttgtcatccactgcattggtctttctaccaactcattcatcctctgggaagatcgaatcactctctacttcctagtcactatttctctcctaagtctcgcctacgcgccagctgctcctatccccaatcttcgattgcgactcatcggtttctcccttctcttcgccaccacccttcgactctctggaggttcgactatatgcagagaagaaaacggagcatcatgctcagtttcattctatcaacacgcgtctacccctcagtcgcctagctggttgctggctttgtctttccctgtagcctacgtgctaccgagcattgttggttctttccttgggatctcaaagtcttatgccggattagcacccaccataaccgggatgttatggcgaggtgtgatgctagctggttcagtctactggttgtttgaaaggggggaaacatgggaagcggttaaccctgcccggattcctttgttgaagtcgtcgaaagtttggttggccaggctggtgtttgtcgctgtaggagtgatttactttgtttggtatatttctcctctctgtattgaagcccgtcgagctggcgaggaaaccaagaccggcgctgaagaagaaggggaagaagacaatccgctggctcctcctaagcccaagaaaggtcaacttatcgtcttgggtttcgccaactctttcggatcaagctatcttctcttcctcctcccattgttctcccttctttggatactagctcaaccaactggccaaatcgtcctagcgctcaacctcgtcgctttgctctcgttcttagaattgacagactctcaaagagacgttaaagctgttgtacaagctttcgctaggtcaacagaccctgcaggcttcaacggcccggaagccggaacgatcctaccacccacgttcactgaagcttccaccctggctcttctaagctctttgttgttctacactaccggccatcaagccgtgctctcgtctatccattggtcgaccgctttcattggtttcccgacactcactcaacccatagctaccctttttgttggactgaacacctggggtccgttacttttgatcacgttggccgtacccctactcggtcattggaacgtctccccaagaccaaaaaaccacgtaccagtcttgcctgattctctcaaagcgattcttggctactcgatctatcaatcttcggtcgcgatctcaacgatgacttgggccgcctggcacaggagacatctcatggtctggccagttttcgcaccgagattcatgatggcggccgttgggttggtcgtcgttgatctaggcctagttttcgctgttggagtgggaatgagactggtcgataagaaagtcaagaaggtctttgccaccgtcacttagatttcagttcttcttctctcctcttcatacaaaagcgattaaacgatgtttagcaaacaaaacgatgcttgcgcttgttgttcttatttgcatttgtgtttatgtttacccggaaaattcttttctttttcatatcattattataaacgagggaaccaaggatgaccgccatccgcctggtccttcttgcaagattcgattaattgcgcttgatcctaatcacaaagtaagagacaatcccaagagcgataacagagttcgatgcgaacagaacgaaggtgttagtacgctggatgaatctgaatgatgggcgacgagaatagggaacatactgcttcgagcgtcatggtaatatgttctggaagcgggcttgaaactatagacgttgctttagtcgggaagtcttctaaaggatcgttcaggtcgatcgaagccttggttatcaagacaagacgaaataagacaacataagagatgttagatgctgcacccgacgtatctgacacaccagttatggtaaaaatctaaggggtgatgcaagaggggaaacaactaacaagaccaaattgaatagcttgacaatcctgatgataatccgaccaagttaggatgaatcgatcgttggtcatgttcgaaacggaaacagaggcggtccagtcgacccatttgaatcgacttttgaacctcgcttggaggacttgtggcggaagagtcgcccgaggaagagcggcctatgatcaagtccagtttagagtttaaagagtaagagtaagggtcagtgcagaacgtgtaagggttattcccatggttgatgtaacaaggccaggaaagagacataccaagaaccgctgcctagcgagcgctcctaacgcccgacactgcatctctttcgcctcccaagcagcctctttatcctcctgtccttctaattgattcaacaggtttttctttcttctcaaagagttccacacagactcttcctctccaaataatctagcgccagcccaaaagatcattgcgtgttcgggaggatcatacagttcaagctcaaatccggaaaagatcacatgtcgaatgaggaacagtcgatgggcgtgaagcgcgagggggataagacttagggggatcgtccggctcgctgactgttcacgcgcatattgtagaagaagggagaaaagcggtcaaattcatatgcacatggagaaagcttagccagcaagtagaagaataacaacggcagacgatttggttttgttggaagataagttgaatttggggtatcagatctatagcctacacccggtataaacgatacacgagcgtagaagaccatcggaggtcagtttctgtacttgagaaggaagttggtcaacagaaactaaacatacttcgtcgtataattcttcccattgggagatagatttcgcaatcatccgcttttgtctaggtcggttctggcaaaagttgatgagcgtgtttaccagaaactaaaccagtcaagagcgtgaaagagtcgaggaggtataaatcagtgattggttgtcagcaaacgcgcaactatgaatagaacaagattgagggtagtcgagaagcatggcgaggtgggaaaggaaggtgaagacatacgccagagaccctttgctcgaataccttgacggcattacctaaacacggacctggtctgacgtctcccgtgattggatctgaccatctccattgtgggggatatacttcatctccaagctcgaccgcaagctcgatcgtccgtggagggagaagcgcgttcgattcgaagaaatgatcggatagaatacgaagcggatgggagttaaggactaaggaagttcgagacgagtagatcgtcgactaagataggaagtaaacagtcagagctcaacctaggatatcataaatcaaaaacgggtagaggaggaaacgtacgatagtcagggatcgaatgatcggtaacgtctgaggacgagttttggagacgatggaccaagccgacatgtattccttgttttagcaattttaccccaatcataacacgtaaagattagcagaagagtgttaggggttcagacataatctcctaaacgtcaataaagatacaatgggaatatataattaacgaaccaataacccctcaggtccgccctctcctagccgactcacaatctccaatccacttcccaaattctttaccatgtcccatggaacttgttcaatctctagcactcccagcggtacatgactatccagtctcctactgactgctgcatcgatcgccgcgtgagctctgctttttgacgtgggcgtaggtacatgtgttttttgaagagttatatgaagggaattgatagacggaaggagggaggaagacggggaagaaggtgcttgcagggataccaggagagcctgttagaatccataatcagcgctaatcaagagaaactggtcaaaccaacggatttctaaacttatagacatacatgacgatagttcagatgatgcatcagtactgttttccattcgtcttcgactgaaattgatgaaacgatcacaatccgtcagtctgatacttcgtaggtctccaactaggaaaacacaactcataacgaagaggacaagctagctgtaaactatactcaccagaagaagttgagagccattcttgagcttgttggatcaaatctaatatttgggtcgtgtcaacatcatcacagagggctaggccgaagcgatcgcctgagaagtcctctccctatattcatgtagaataataaggaagcaagcgtcagtgttaccggtaacttatcatatgcgatctccagataacccctctaaatcatgaacgcgcgcacaatcctctacgcgcgagtagacatcgaaagcttggttctcgaataaatcgggaggaactcacgtcatacagatttgattttcgaaattcttccaaggtcaattctatcgatttgcaaacacccatcaggtaccctcttaagaccaaccctctcaactgaactgggcatctgttttcgatcggacgcgtctctacttctgatgttgatgattcgaactcctcgccatcatagataggatcgcgctccaagacttttgacagcaagttttcgagatcgagggccttcaaatttgttgggtgaaggggaagaatggtatatacggtttgggcgagtgtagatccttgatggtaagccatctgttgtgaaccgcggtcgtatcatgtcaattcgactaaacgcggaaagttgaatctatggcaggaagaatagatgctctaagggtgtcacagacctcacatgctaggactcgctctaagatccaggctatctcctcgggcagcagcggggcgaatggatcgtagtcttccctagctgtctcttcaggaaactcgacgccagtgtccattcgaggatccataacttttcagttcgaaggaagaaaaggtggaaaccgagtcttaagcaatgagacaaatagtgccgaagatcaatcatcaaaaacagagacatactctctatagcattcatcgcatcctgccgattgccaatgttgacaggtaatttcgggcatgcccaacaaggttctgtaagtcataggagaatccacaaccgcacgatgacaagtccacaaggaacgaaccataagagtgaggtttggcagcttgacaagctgatcgatctcaagctccgacgttccatcttggatgagatcgatagcagagacgaatgttgagggcatgtatgttgatggctgatggctgatgccttttgtatggtctacagaagaaacaggtaagaggtagaggatgaagtggtaaggctgtgtacttgacaatcacgtgtttacctcatgtggcaatatccttcatactaccttcaaacgaaacccggccgaagcgttttaccatcgttcaccataagtgaggagtccccggtatgtacgcttgttctcgtcaccttcagagaactacctcctcggtcacctcttgctcctcagctccgaaccggttactcggctcgaaaaactctctttctgcagaactctggagaagcaacacgtactcaagatcacctggaggatacagcgttagatcagctagttccaaaaatgggtctggtggctttggctctttcaacaatcggggaggcaacaacggtggtaatacgagaggaggaactgaaggaggtttcggtatgcctggtagacctagcccagatgcctggtcatccttagtatctacaaacaagaagcctgcgttctcagcattcaacagtgtcgcttcttggtcaaacgctaattctggtgctgaagacaaagacagaaaggttggaggaaacagaggatcaggtatgaagggtaaacgacaaggatctttcagcgcccctcctgccgcatcggatttgccgccgaagccttcacccacgccctcccactcaaaccagccctcaaatcaaacccagaatgttccacgcagtggttcctcctcccctagaccacagtctgtaccttcgactgatcgaagcagcaccggaaaaggcaaaggcagcaacaacaatcagagccagaatcaaactcagaaacaaaaccgaccttcgtcttctcagcctaaaccaagacctggtcttcaaaagaaaacaccctctgactccaataagacgaacagtaattcacacagaaaacagcgcgtccctcgaggcgatgtatacctcccttactcgatatcagtagcaaacctctccaagttggttggatgttcgctccgtacgtacaaacatctgtttgaatgattgtgttggagaaccacgtgaaccaaacactgacatcgtcgagattcttaccaactgatttaaattcaaaggtcggttgcagtatgtcataaaggacgcaggcttgcctcatgcggatcctactcatcgtatgtttcccgcttctcgattcgtccttattgtttcaaatctcacgtgtgccttcttgttattggttctttcctgttttcttccttttcctctccgatccgcgctttctatgatgatgttcatagtgatctcggccgatgacgcatcgctcgtcgtttacgagttgggattcaatccggtagttgacgcggaaaagtcgttcgatatttatccagagtatgtttatttcgtgttatgtatcaagtttctctccaatgcttgagagaacaagaagctgacggggttcgtgtacgctcttgattattttataggcctgcgccggaagatccaagttcgttgccattacgacccccgatgtacgtacattcctcaaatcatcactttttcagagacctattccatgaggctaatgtgtgccatggttttatagtgtcactatcatggtttgttcgccgtcttttcactcacttggttcaacccaagaaacgtaaggcgtttcatgttctaaagcgcttccttctcttcttccatagggtcatgtcgatcacggaaaaacaactctacttgatacccttcgaaaagcggctgttgccaaaggcgaagctggaggaatcactcaacatatcggagccttttctgtccctattgcctcttccacccccggtgaggccccccggacgatttgcttccttgacactccaggtcacgctgcgttcaaagcaatgcgcgctagaggagcaggcgtaacggatatcgtcgtgcttgtggtagcggccgatgatggtgtcatgcctcagacgagagaggtcattcagcttgtaaagaactcgccaaacgttcagctcgtggtagctatcaacaaggtcgataagcatggtgccaatattgttcgtactaccttccctcaaccctctataagactcgagaattgacgctattttattctaattatgtatcgaaccatgtccacaggaaaggatcaagaacgagctgtcggcaaacaacgtatatttagaagattttggcggtgacgttccagctgttgaagtgtccgggatgacaggtcaagggttggattatctgatggagaccgtatcaacgatcgctgaggtggcagagttacgagcagaggtagatgcccgagcggagggtgtcatccttgaatctcaagttgacagaggaagagggttcgtcaatctatatcttccttttatatattctctgcttcgagagaatcttcttcagagtcacttactcgatcacccatgtcctcccttccaaatttcataccacaaattgatcgacagaactgttgccactgtccttattactcgaggaacgctcaaagcaggttccatcttagtcgccggtcagacgtggtgtaaagtccgtcaacctcaggatgacaagggcaagccgatcaagaaagctacacccggtacacctctatcatgttccggttggaaggatcttccgtctgccggggatgaagtcttggaagccagtggtgaggaagctgcgaagaaggcggtggcaaatcgaatcagagaaatccagcttcaggcccaaattcgagatatcgacgtgatcaacgatcagaggagaaaagcatcagaggaacatatggttgaatctcagcgaaagaaggatcttaaggcagctagacgagtagctttcatgaccggtgagaagatgccgacacctgaatggatggtcaaggatgaaggaaaggaagacgagatcaagggcccgaaggagcttaggttagtcgtcaaaggagatgtcagtgggacggtcgaggcagtggtcagcacattggagagcatcggaaacgcagaggcgaaggtgagaattatctcatctggtgtgggggacgtgactcctggagatgtcagtatggcacaaacggttggaggtaagtctgttgctttttactctttacttctcgttcttcatcttgagatttctatccgtctcatgattctgattatgttggtcttttgttttaatcagctacgatcgtcggcttctcggtcaaatgtgacagacagaccgccaatcaagctgcggtgtcgtctgttccagtctatctagagggtgtgatttatcgactagtcgaagaagtcgtctctcgatgttccgacttgttgacaccaatcatcgaagtcaaagttttaggcgaggcattatgtcagcaaatctttgaaatcacgctgcccaataggacggtcagcaaaatcgcgggttgtagggtaaataatggtctcgtgtcaaagggtgaaaagatgcgggtgttgaggaagggtgaggaggtgtttgttggttcgtccatgtgtttctactcagctgctgcaatcgcttttgtttcatcgatttgaatcgattgtaggagtactaatgatatgtctcttcttatctctgtgtgtttctatcaggtcctatactcacactcaagcaggttaagaaggacgtgaccgagattcggaagggatctgagtgcggaattcaattggtgggcttccaggatctagaagaaggcgatgtgcttcaagtcagtctacttcccctcctcatctctatgctgggtacggccgatatctgacgagattacgttttttcatctcttcattcctgcagagtgtgcaaattttggaaaagaagcgttctctatagaaacccgtttttggcttctcatacatgcgagcatcccccgtcacaagagagaaacccggtagaatgagaagaacaagggaaaggctgagttgagaccaaaccgttggagacgcgtgttaacgcgtgtctttgacgcgtcatgttcagtgaacatttctacctttccatttgcggtcatctttcctcttttttcttcttcaacttctacttctccttcttcttcttcgttttccttcatcatctcttcataggacgcctggtgcgccttgtaaatcaacttcaaccatgtttaacccttcctcccctaccgtatcccactctaccttccagcgatccctccccccttcttctccctctctttccttcaaccaccagtcgaatgctggtgatgtgctacctacattcatcaaaccctctgctcgcccttccgtcaaacgcgccggcctcgctacacccgctccttcttcatcttcgcctataggcaaatctaagagttcatctatccgcattcttggttccacaaagacggtgtcaacagcagaaaagaaacgaaagttgactacaaccggcaaaggagacggaatcagaagattgaaggtcaaagtgacggatggatatgtctcacccgctacatcttcgcctgttcagaaaagatccgaaacattcttgaaaggtcggagagttttggacagggaagacgaagaagagaaggaggatgaggatggtgacaagacagaggatcctttgtccgagattgatctagggtcgcgaccgttctcctcctccgtctctccagccccagtctcacctgtacctatctcccgtagcgcatcaagcctggtttctcctagttctttctttgcaggatccggaaataaccccctaaagagtcggccgtcaacccgattgacgaccgaacgaactctccaggtctttccaaaagaatttcttcaatgttcactaccagttctacatagttccgactctggatcactatcgtctgtgacgcaattgatcctctttggacggacgcaccagccgtccaatccactcaataaacctaccctactctctccttcatcctcgactcgtttggacttttcatcgtttacttcttcgtctaccccggaacgttacgtgttttcgctccctcgaggatctcctcatgcctctaggcaacacgttctcctttcccggtcctctcaatacccacacctgatcactcttcggatactcagtcggaatggcgcgcgtatcaacggaaagcgtgtgcttcagggaaatattgttgtttgtgatctcgagaaacaaggagaagtccgggtgagcgaaccggagggtaaggaaagaatcttgaggaaaggaaagggtggaagacaagactgtttgaggattggttattggggcggagaagtcagagttgagattcagtctgtgaacaagcaagttcaaacagacgaagaagaagctctttcttctgagatagactctgagtctgaggcggaatcttcggcgctgtcttctacttcgtctgacgaagctgaatctgaagccgaggctgagtgcgtgagaacccctgtccgaactcgactacctacccggacaccctccccagtgttctcgcccagtccttcacctcaaaaaccgagtttacctatcccagctcgacctctcgagccatcgcctgtacctgccgaggttgatcttgcctctctcctctcgtcagctttggtattctcgagacagacatcattaactctgaaggatctgacaaaggcggtgttggacggaaacccggcacttgtacagttgggttcggaacagagatgggaaagctggctggagagcgagttagagagtgatggaatgtggggaagaatcgtcagagttggaaaggttcgattcattctttcttcctcttgttctgccgacattcttcgtatcctgcaagttctgatggctcgatcgttttgaacatttcttcggtttgtttccttctttcttctctgcttctgcgtctcatgaatctaggatgcatccggtcatcctcttctagatcaattcttctatgatcccgccaaagacgcagacaagacccgagcagcagagctcggcagtcttatgcgacccctccgaggaagtaagtcgctattctcttttcctctccctctttcttctcttcgttggatattctcttctgacttgaagctcttctgtctttcttctatttctcctcaacttattctcagctcaacggcaaggaaaaacatactttttcaaaagaccatccactccgggaaagaaacgtagatgacagtagaagaacgcaatgtttttctttctctcttttccttgccattttttccctattatctttcctcgtatccgttctttccttgttcgtgtattcgagcctttccataatttcttccttctccttcctgagctaggcgagaaggcaaaagaagaagggcaagaggtatattggattgaccctgcgggtcaagtcttttgctctctctctgggttgtaggcgcttaccggtctaagcctgccattcgtcccatccgtctctccgcccttccagttctcagactgaagaacagaaagtgaacaaaatcaggaaccggttctgtctctttgcatttacctttctcttttccttacatatatatttagttagttagttagttagttggttagttgagttacagtcgtatcagatgcgcattttgttccattctcttgcttccatagtccctttgtcgttgtctttgtgttttagtatcatcatcgtcaattccttttatgccgatttcctattgacttgatagtaaatcggtataaaagaggaataagagaatgcacatatgttccacaatgggggatgatcacaatggataaacattcttctccgacaaatacaatttcaattttatagtgtacaatgtacaaacaaggactttacctagaaacggaatatgtcaccgaaaggctcacttcaagaactagagacgaatgacaaaaaattgtcggtttgagtgaatcaccgaaggataaaagggctcaagaggcaaccagaacggaaccagaacacacctgtacacgttcttcttccgagacatcactcaatctgaattctgaatcctcgttgacggagatcaacccaatctcctctccttgcccttggttcactctcgacctcgcttcggataggaagaacgtccaaaaaccgggcaagttcggattcgtagccgccgtgcttgatgagagacatgtggaccggagtgaacgaatgaatctgtgaagaaggaaaagataagatatcgcgcaggttaggttcgagccaagagaggtagagagaacggggagacgaacccattgaatcggggggattcttcgccctagaatccaaccgacatcaggagaagaaaccactcgaacattacgtcaacacgcgtccgttctctcctcgcgattcctttcctggactctttgtagcaacatgaacaagaaaagacaaacctctagggattcttttctgagtttcaacaaacaatccaacgcgcgttcgttggatcctgcttgaacgagtctgaacatatccttctgtagacgctccaatgctgttgtcctcacggtccaaagattagaagacgaaggtgaacaaagcttgattggatctgatggggagtagagacagaaagatgaataaaaggaacataccaaaaacagtattatctccatcacgcttgatcagcttatcaaattcgctgatgggatcctcccggtcttcttcccttccatcctcttcatccatgtcttcatcctcgtcctcatcctgggtgatggaaccatcgcttgcttcatctcccactgccgttgtgggaatcttgatagttctatcgggcgagagatcaggcccggctgtcgacccgcgctgtttcttgatagacacctcggaagaaccaaccggacgacgtctccctgagagtcgctcgagcgggagaaacggagggatgggatccagagtggattgtgcaaacgtttcgcctgcctttgcgttggccatcgacgaagaagcgtttgctcttgcggctgctctgttcttaatcaaaacatctaacccttctcccaaactatacgtgaaataagattcatcaaattaaacatcagtctgaatttttttcgaatacaaagagaaagagatgatgtcgcgcgaaggataagatggagaaagataggggaaacatactctatagattcttcgtcttcttcatctgggtttcttctctttacacgaacgactgttcaaccatagaaggaaattctgtcaaactggtgatcctctgacatggttggaagacaggagaacaagacagagaaagagaaggactgtcatacctttatggacgtcaaacacgtcgacagcagtctggacggtctttgccgctgcttgaaccagctgtctcggagttgacagatgactcgttaggcttggatgggaagcgcatatcggttgatcgggggaggcagtgaattcatgatacatcgcttcttttactcgatgtagtcctgggttgtagactttagaaggatggtaccatggctggctctctctgatgttgttttcaggacgttttgtgccaaagaaaacgaaccaagacaacaagaaaggggcgttttcagatatgcagtccaccaggaaaaaggggggggggggagaaagaaacgcatggcaagaactgacgactctgtctttgtttctagaaagtctaaatccaacgcgttgacaagatccaacatcgcgttgttctgctcatccgtgggcagatacgggtgttcctttacgatatttccgtctgtgtcctttagatgcagcagagagtcaaaccagtacctccgataatcatccgcgaacgggacttgaacgagttgtaagccgtgctgaccgtcctggtagaccggtttgcctaccatcatcctgggcgcagcgttttcctggtacgtgtacctgaacagagcgtagacttcaccctttggatacgttctcatcgctttcaccaagctggaaatttcaatttgtgattttgttgatttcggattcgcccagacttggtatacttcgcccatttctagttctcgttcgaactaaagcggaaaggatgaggagaagcaggatgaaaagggagaggaagggagaaggaagcaggatgaaaagggagaggaagggagaaggaagcaggaagaagacatcctgttcaggacactcacttcaggactcggcaaaaacagaaaaagtggaacacaccttatgagcgggcataaaccggtaaagccagagcgccttcctagtctcgaaccttcctatgtctgaatcctcgatcgagattggtaaccaggtgtttccgaatttgtgcgatctagtcaaatcctcaaccgccctgtcgaccttgacggaatctttctcggtctcggtgccagcctcggtgtcagtttcagtttctctggggagttcgacgatgtattttttgataggtttgagcgggttggagatcacatcatacaggctagccgttatctggaatgatccgtcgtatgttgaggaagaagagccggattgagaaaccgatcggactgcctgggaggatgatccggcggggaaagtagaggtttgagattgttcgatcttgacggtgggattctgttcagggtcatcatggtgtgagtcctgagtgactatttggcttccgcccaatctcactcccgctccgggtctctgtcggaccgctatctttttcgaccctgggggcttgacgagagcagtcttttttccaattacgacgttaaactcgagatgactggttacggcctcatggttgacgtccatatccggatcaccgataatgagtgagatgctgttcatcatcggcttgactgtcttggtgcttggcgcgcgggcatcgaggacacttcgatcgagggacgttcggatgatacgttcgggattttgtgcaatgagcccagacaatatttgctcgttggtaatcttgaatttaaaagagagaacccccggtcgaaaggtcagctggcttagctctctttttcttcgcagagagcctgggagtacacacaaacatcttggtcttctcaaacgaactcggtccagcgataaattcccattctgggtcatctgttccatagactctatatagaaggatgagatgagactgaggcgagggtttgtaattctaaagaagagtttgttggaaagattaatgttgggaacgcacgaaaagttcacagtcgcgtttatcttggagagacaattagcaatatggtcaaccagatcgtccgccagagcgccttgagaagctgggtggcggacagggaaaagacaaaggcgaaaagttaggatggttcgaggggaacaagaaaaaggaggaattgacggagaatttaccgtctgtcaaggccaaaaattcgtatgaccaggttgatctgttcctagcagccgtcctgtctaactcgctcaacgccagggtgagtccgagaaggactagagtggagaggaagaggagaaagagagcgcgcacatcagaacaagaatctgaaggagtgcaggaagagaagaaacttgccatccccatcattcgtgccgtttccaagcttgagggatttgaccttgtcaaccatccatttcgcggcggtggccggttggaagagaacgtctacaccttcatatccttgagtttgtgggttgttggttcctgagtgatggagagtgggtaggtgtgtgggtgcgcggatgtccaacgcatacaacgacaacgaccttctgtcagtcagaataagctggtcgatggcaaggcgagaccaaacgagagcattactcacggtcacctgtagcaacgaccatgacgtgttcggtctttcgttctctcataatctatctcgtttgggtgcatacacacacatatacatgagatggaaatccgatatatcagtttctgggacatccaatctataaatcccatgtatatgcgcatatatatatatgtgtgtgtgtgtgtgtgtgtgtgtgcgtgcgtatggcttgcttgagtgagccaatcttacttaccacagacacgatctttctcataacaacctctctggcgagctcaaacttggaaacgacggctgagtgcagatgcggattcgaacgtttttccgggagcgactgttgtgggtcttggacgagtgcacccatcggctgagagcaatcgatgacaaacacatgggtggtgtatcctcctctgtctgccatgagaggaacggggtgaaagagtgaacggagtattgactgggcagagtgtggatgtgtgtgtatgaaggatcggattggatgattgaggctgaatggttaccgagggaccgcgaccgatggtcacaggcacgatcaggggcacggtcaaaaggaacggtcaaaaggcacaggcacaggcacaggcatccaaaccttgatgcctaatcaaggcgcattctgcagccgtacctgatcgacagagcgaccgaaagaaggaacgagtaaaataaacaacgaggcgctttcttggctactgtagtagagtttgctcgctgagcggccagacctcacggtgagaccggcgggcatgcgcagcagacaggcacactgtttttacactctccgtcctgtttagagttgccggcgagaacaagcggacaagcagacaagtaccatcactttattattccagctaacgaccgacgaagcgatcggtctgttgacgtcggagtgataccgacaagcacaacaacactcaattaatcaatcacttacttcatttaggtttgagaaaaaaccggagaggaagaagaagcagaagcagaaacagaagtagaagtagaagaagcagcaagagaagaaaagaggaaagaagacaacatcatcctcgataccttcgtgatagccttgttccttctatacaacctgctcggtacagcctccgttccttccagtctctctgttctgtgtccttctaaaataaagccatcctaggacacccatcaatcgacggaaagacaatcggcagacgactcatacataccgcacacacgtccagtaggtcttctcttttcttgtctatgcacttgcttttatctttctttccttctttctttctctctctgttcttccctctgttcctcttcactctttttagagcagctcagagcagccaaacgagcagtcaacatcgctcagacgatctcgtctgggccacttctacgtcttgctcaacactttgatgtcactcgctgcacagagctcaccgacggctcgacatgcatacaccttgcccgaactttgttcttatgcttgcacttgcacttgcacacatacacgcacattcacaacacatatcacacacccactctacttgacatgagctatgtgctgaagactgtccatccttgttcttcctagattcacaaccgcaatcgtccatctcgtttcccctccaatatggcgccctcatcattcaaacagccacggatctccgtcagcgaatctttccttcctggcccagggttttcatcgcggagaaactcctcgttcagccatcatctccctggatccaagcgaaacagacagcgattctgtcttggcttgttcgctctcggcttgaccgtcatgcttctcacctactcgaactcgcctttttctagctcattacaatcaagtagtgtgttccaaagagaaggccgaacgggcgtgtcggctcctgcctctactccagcccctgccactctcccagtacaaaccaaggacaagcagaagggcatcctcgccggctggagtctgaacggtaaagaaaaggcacaagaggttgagggcgagtacgatcttcattcaattgccgaaccggaagacactgaggagactgtcgtggctacctatgtgcctgttcaagaagagcaaagtgagctttcgttctcttttttattctttttttttttctcttcattcctccagttctcttttgccctttctgttttctcactcgagcgtctttttttttggcttcttccttatcctccttgaacagaacccaaaccaatcctggcgcacatgaccccggatggaaagattgaacagatccaaacgttactatactttctcctcgacggaggtaccctaccctctacagacaagctcgacttagataaacccattacattagagactctctcctccttgggcatcggcggctcgacgggaaccgtacaggacgaaagctggaaggcgatgctcgcaaagagatatcctcttgttgtcttttcaaaggcaagtcccgttgctcctctctccctatctctctgttctcgcttctgtcatgcccatacgctccctgggcttatcttttatcaacttttctactcttttttcccttccttcttcagtcatactgcccgtactcaagaaaggcaaagacgattctgaataacatgttcctcaccccggaaccgctagtgatcgaggctgatctgcgccgttcgtgtctttttctcgttcttttgctctttccctctaccctccaatgcgcttttctgatatgtttttcattcctttttttctctttcctttctgaactacagccgacggggcagccttgaagacattactcggtcatctcacgggtcggaacacgttccctaacgtgcttatctcgttcgaatctattggcggtggagacgacgttgaaattctctactctgaaggtgggctcatcaaaatgttgcgcaaggcaggcgtcagcgttcagaaagcgtagaccgctcttctatcgtctttgctctttctctttcttcctctactttcgatcttgcttggttctattttcttttttttcttcttgtactcttttcggggcttttcttctgttttttttttcctttaaccttcatctatctaccggcgcgtgaacgttgtcagtcagttgactctacctacactagttgtatttgtatttgaatgacattccgaaaagtgtcttcctctttgcgtagcatgaacaatagctcagtgacgaaagaatggcagctggtgaatgggtcagatggaagcgaggtgtttgctgagatgtaacatggatagaccgtcggatgaggagaactcggtcgggtataaagcaaaggggatatcgttgtatgccggcttaaaaaagagattacacacgcgacgattgtttcgtttccacgctcattctaacaacctacggccatcctctctccttccctctttctttattcctctcttcgtccgtgtttctttggatcaagaggaccaggacgttggatcctcgatcgacactctcttctttgaactcatatcttcatgcccatgcctcatccgtcggctctgcctctacatatactccggctgatcgcactacatcatctcgcgttcgttttcaccttcctccttcgttttctttttcccttcctttcctttcctctcgcgaaccctttccttgaagactgattttctctgttcgcttctctgatgtcgctgcttcttggacttcccgatctgttcataagtcaacatggattctccgcatcccatgctcaagcatccttagcactgacagatgtcctcgccaggtttctttcccttctatcgagtgaatctggctcgtttgccgaatcggcaggaaggacccaagtcagtcttcaagatggaatagcttgtgttgaatcattagggatctcggtgggtgatttggaggccgtctggagaggagatgatcgatcgagggtggagagtgcgataggtctgaaacgttcgtctttgctttcttcctcttctttcttccttcttgctctccttctcgcttgcctatgttgctttgtctgacccttcgttttacacatatctcatctatttctccgtattgtttcatctcgaaaagattacctg

SEQ ID NO: 3068 - DNA, 19972 bp, Xanthophyllomyces dendrorhous
gattacctgaacgaaggacttgacctagacacgtcggatcatcagcattatatctatactgacgtcccgcccgaactagaaacactgtctccatccggacgaaaacggtcggcgtctgacgcgttcttggtcgatagtctgtctgatcaatccgaagcagagtcggatgagcaggacgaagacgaggatgaggagaagataaaagaagggcagaacgtgtcggtcaagcaggaggaaaagaaggatgtagagatggatggaggatctggaagttcagacgaagaagacgtgtctactcctttcggtggtcagcttagtgaaggtcagaaacccaagatctttacttcggaagaaccttctttcgctgaaggaatcaaggacgaaggcgagatagtggatgagagggaggaatggaaggcagagacattgagggaggttgagttgggttgggttcaatcgtggaaaaaagaagagaacgatggtccgtacggcagactgtcaacctttcttccgcctctcccttcggaagaggcgtacgacccaatcccactctcgacgcctggaccgctgtctggtttggccatggagaatgataatgaggacgggaacgggtcgttgacaccttcattagaaccggtccttcttgaacctctccatacatctctcgtcccttcgttcctacatccttcagcattctcttcctcttcatcgacaaccgtactgccaactctgtcgaacgacccaccagctccccttaccacttcgtccgctcctaccttcaaggcgctcaaggcagcacatgcgtcccttccgccacctcagaccgtgtcgtatctatcccgaaacccaaataaacctcgagttcgagcggcctacctgttgtcgctcgtgtcgaacccaccagaaaattattcaccaacaagctcactcttcagttctgtccctgtgcccgcgcctagatcaaccgggatcgtccctacgttacctaccgacccgaacgtcagtcttccccccggagcgctcaaatcgaaaccgacggccggtcatctcccgacatcagcgttatacccatcgactccccatcgctacccggcgttactctcttcgttggctagacatatgggtaacccaggtttagtggcacgtacgacaaacatgccgtatccagccccgttgatcgacaaggggaacccaaagttctatggcttgccccgggttggaagagcgacgatcgtcaaaccggtagaagtagaggagggcgaagaaccggaggaaggagaagagatcaggttggaagcaaagagtctagatgtagagttgaaagctaccgttcgtccctgctcttccctttctctatctgtttcttacatgcgtcccctatccttgctctcaactgagtaactaacgcaaaatgattgtctacttctgttatactggatggggcatctttagtgggacgcgccgatcagagattggacggataccgaacttccgtttcaaaggaaacgaccgccgccgcctcctaagaaagaaaaggagaaggtcaaggagtaaaatggcacagagatcgatattgtatcatctcccccctattattttcaccaccggttcttttttccatttcttgtgctctatccctttgtttcgttcgtctctttctcttctttctgcatccttcatatcacccccaactcacttggcatccacgattccctctttcctcaatccctgataatcgcatacgcatctcataaaaaggaaaatccttgtacaactgtgtcctaacatatactctcatacgcaatacctgcccacctatctacactacctatttggctcgagagagcccttcgcgctttttaatgaactttgacgatcttcaacctgacctctactcctcccgttaaaataaaccaaagtagagcaagccatacaacagaatatgaaacgtgaccacagatcacggccgacccataggagaaagagaaagaagaagaagaagaaaagattctctatatagaagaaaccgcactacctgtatcgaactttcgaggatcacctgctgcttcccagcccgattctggtgagaatttcacagcgcatgcaaccgatagcccctttgatgttcatccatcgtccgtcatcgttttaaaaagagaagagacaagtagaagaaagattcaatgtcaattttatttctttccatagagcagttcgcatcttgaaaggaaattgaaaggaagaagcaaagaagaggggacatacagtaggcacataagtcacgttgtgccccaacgacgacagatagtctctggtctccatcgagaatctatcatagctcagaacaatgacagaaatagatatcaatatcaggattctagaacaaaactcaaacaacgaaatgaaaagataggaaagaagagaaaatagtcggaccctttaaacccaagagctggcatatcctgctcgatagccgtgacggccggatagacctgatcatgcaatctaggagctgtcaacgcttgtactgtaagatccaccaaacggttcgtataaataacatcttcagatcagatctgtcgatcgctctgcgtgatcgcggttgtgacaaataaagaagagaaaagactgacgagcagacattcctcgatcctgtacgatgagaaccctcaaaagatgttagtctggcatcgtttgaaaaagatccttttccagttcatcccactctctctgggacacaaaaggataggacagaaaatcttcgtgacgtacaacagcattcaagaccatctggatctgagccgagatgattctcgatccaccagcgcacgagctcgcaaacatgaatttccctgatggatcatcgatgatgagaggcgacatcgaagacaaaggtcttttgaagggaacgactggtgagaggagggggataagattggcgtaggattcaagtcaatcaaggctgaggttaaggttgaggttgaggttaggatttagtaaaaacaaaattggtgggacttactatagttcgcaggcgagggctgtcgatcatgatgaggacaaaggcagtgtcgtgtcaaaaatgaagctgaaggcgtaaagaaaacaaagagacatacgatgtaaccgaaagcgttcctccttcctttcacactaaagtcgtctaccccgtcattctacgcagagagatattaagcggcatgaaagatttaagtacattgagtggttaacggaaaacagaaagaaagaggtgaaagtggaagaaactgacaaggatgactccatattcaggtgtcatgatctgttgatcagatagaaccaacagcacgtctcgattagtcagtaagtcggctctgaagatcgcatactagaggtgttcgtactcttgatccccagtacctatatgccccatccaaccagaccgaaaagaagcaaccgaagtcaatattgttttccatcaagacagaaatcagccgagatgtaccggacaaatcaatgaggaatagaaggcctttacaaattaacagtcgtcgtcaccgagacggccaaaccatcttcgtcgccgacgactaacgcgctcgtccctttgtcgtccaacacctcccatccctctggatcatagtagtcgccttcatgagtggtatggtcattgatgagcgatctgacatgctgggcggtcgaaggtaggagaaaagctcgttgaagagtcgaggcgttggtgtatccgatgtctcccagaagtgttcgttctccataagcaaacttggtgatgaaaatatagacggatgatcgcatagtggaagaagtaaagaaaggaagaaatgagtaaatatcagatgatgcttgtgcttccttaacatgatgacgtaccttcatagattctacaagtcgatggatattgacatctgaaggatcagcctcccgaccaaaaggttcatatccgttcattgtgttcaacgtcgagagcaccaagctacctgacgaaggtgcttggggagcataaactgtatggtttctatatctcatagagagcgccggtcgaacatgggcttgataatctgggttgaagccgtcagattcattcgaatgaaaagaaataagcaggtgaaaaagaagttaagatagtgtcaactcgagaaaaagaacatgatgggagagagggagaacgaactggccatgtcatccaaggacaaaacaccgccattcttccttacgctcgccactatgtcttctgcaatctttccgttgtagaacgcgtctggcccgtggtctgctacggcctgtaacgctcgggcgtacgtcggcctggtggtgagtgagccgacagagaggagtgtgccgtttggggcgaacactttcgagagctcagagtcctatttgtttggcaagcgcgatcaggatgacagaacaaaagaacggtctcagatgggtgagacaacacgcatagaagatgaggaaacgaacggtgatcaagaaggactcgttgtagcctggctcttgacctggtacgagtttctcgtttgcatatagcagggattcgcctttgaagtttgtcggccctctagattcaggtcgagtaagattcattgcctacagttcatagcatgacaaaaaaacagatagtgagcacgagaggccttgaacacacctatagaaggaatggatgggatgacaataggataaagactgacgacaaagaggtcccgattgatctcaaacccgtcactggcaagcttgatagcaggctggaacagatctttccaaggcaactttccgtgttttttgtggattgcctctaatcctcttagttcacccggcacaaggaccgcgagaccaccaaccattgtggattttgttgggtcgtcttcgaatatcgttccgttaagagctccctttgggttgtcaagattagacaaaacaaattcatagttaagcgacatggatattttcaattacgcgagagataagagggaagggaaggagttagacaaacaggtgcagctcctctgaaatcaatggactcaaacgttccatctggtgatctaacgagagcgaatccacctgatccatacagagtttcgtagttgcgaagcattttaagcaaaaggagggcaagtctcaatcagctaccagctattggatttcctcactctacatatcctgagaggtgtaagaggaataatgtagaaggatgaaggcaggataactagtagaaagagacagagacagacctccaccaaaaccggaatggtaattagctattgtgcctacacatgctaccataccgaccatcgcatccgccgcactccctcctttctggaggaaacttgctccaatatctgttgagaaggttttaccattagtgaaattgaaacagagatatatgttagggtattttccatctggatggtcaagagacaactttgttcggagagagaagagggagacaaagtgagacaaaccggcacatagttgaacttcacacgaggccgcccctttcttcggagtcggtttggatgtaggttgtaagagcgaaagggtgggtaagagctgaaggatcagttgagggatgtacatgtattgctgcttatactattattgttctgcttcttctcttgttctcgatgatatagacttgatagtgggaaaagagagagagaggaagaggggggagaaggagtttgttggtgttcgtcagaccaacggagttggccgtcagataaaatccagcaggcgataaacataacaaataagattgtattcacatcctccgctatcatcaccttgccatacatcaacagtcccttgctttggcacaagaacattcaaactcatcagatttcgcatacacatacacgcaaatgaggccatcagaacgttggaatgcatcttgtcgtcacgttttcttgtgcaacacctttcattctggccttcgtttcctccagttcttcaccagagagcactcgcctgtctactctctgaggactattgcgaatcagatcaatagtctgcagaaagcctgttgaatatatctaagagataattacagaagctcagactcgcttagaatcgattgagggaggctgagttggggtgaaatattgagatgccgagaaggtatatctgacggacattcttcaaacaggatcttggctgacatgtcaatgagctacaggtgataagacatcatgacacacccattgtgagaggcggagagtctatgcgagaatgcaaccatatcgagcccgaaggcagcatagtactgagaggggtaaagtatgatttttcatatattaattatgtttgacagatcttgaattgtttctcgatcggtttgttcttttccagttcttttctctttgtacaaagagtgtttgcaagcgtggttgctttctagagaccgaggcgatttttatgtaccgagagagggaagagcacacagaaaacagagttcaggagaggaacgctgataggatttctgcgtgaatgacctggacgagaagtgctagatgaatgagaagaacagagaagacatattcagcatatcgggaaaggaaagaaggtcttttagaaacgacaggcaatccactcacgaatcacatagactctttcacctcatcttcatgtgccgcatcatcggcttcattcttgttgtccttgctctcctttctcgttttcttccttctctatctctccttcttctcccgcttccaccccttcctccccttcctcatcgatcataccacccagcttgtctaacaagcggtctagcatgccctccagtccatccgcgacttgatcagcctcatcgagcttcttggcgagttctccggctgcgttctctccttggtcttcttctgaatctagtgtggcggtctggttaaggagatctatcatgggttggagtagtgcgagatcttctggcgtcaggcttgacaagtcgatgttggctagagatgatgcggcaggaggattactgtcgacgcctttgctgttgctattgccgttgctgccgttgctactattattactgcggtcgttcatgtaggacattgagtctgctacaagagagaggtcgaacgcgtccgagtctgaggatctagaagacggcatgggtatcagtgtaaggtatgggtgtatgcttggacaatctttttaagacgttcgcagaaaacagagatgacgggacaagccaaagaagaagtgatcagacataaccctaactgcatcatggtcacgtgaaaagcaattgacgagcacccgcgatctcgaacgcgacgcgttcagcgcgtcaaatcggatgtaaccacgcaccggaacgtccggcccggagacgattgccgaccgctggcccaatgatcgcggcagataggcaagggtccctgcgacacggggcaaagacagatcactgggagcaagtcaacgggaggcgaatagaaggagagaagcgcagccaaatccgtgctcggttccctgataaatgaggtgtaaccgaaccggcgtaaccgtagccgctcgtggtttcagccggtgggatgtcccgggttcctgtttggggtgttttgtgtgtgtgcctgtccctgaaggtgtgtcggtgtatgctttgagcgctcactccgtcgtccttcctcttttttctcttcttcgttatacctccgtcgggttttatcaacggcagggattagacaacaacataaaccaaggtaaaagaaatcgcccttttttctctcttgtcagtcaacaaccatcatccatacgttcatactcacactcagttgtactcactcaccgtcgtcgatcgtgtgctgacgtgtgccctctggatcatctgaaatgtctgctactcccggtcatgtcaaccctcccaggacagccaggcctaccatcagcaacagacaccgatcaaactcatcttctaagaccaacaaggctctttcgacttcacctatcagaaagtttaccgcgttcctgaacgctcgaacgaactctgcttcttcctcatcttcttcagtttcttcatcctcgtcactggtcttctcttcaccttcggtacagaatccgtcttctaacttagcgacccgtcctagatccaactcgaccattcccacgaccggtgtccgtcgagagctcactccgtccaatgcgatgagtcttgattctactccttcgccttcatcctcttctccttcatcctcctcatcctcctctccgttcaatggctcctctcctcttccgacgacttcattttcatacacacctagctacaactttgtcaactcgttcttctccttcacctctcctaccagaccatctgtgactagaggtcggtccacctctttcggtggtagaccaaagacggccgagttgacgacagacgatccgtcgtcaagagaggtccctaaaaagagctggcgaagctcgcttgtgaatctctctccattctctggcgcgtacaaaggaaagggcagagagatcggcggtaacagcaattccaaccgaaacgtccacgatgggtccgtcgaagatgaaggcttctgggagggtaccggagctagacgctttggttcgtcctgtatctgtggggtttcagacagccacctagtaacgagtcaactgacggccagtcaaacaatactttctacttgagagcagacattctgagtcaactccctacagagattgcactatacatcctactcttcgttccggcagagactcaagtgatatgcagcagagtgagcaagaattgggctctcctcgcgtccgataagtgagtcccctattttgttcagtgtatgcgtgtacagtttttgttcaataaaaacagcgcatacatcgacgcgttcatctttatcgagcaatgtcaagactaatccacagtcttttcaatacaaattggtagcaatctctggagggatcggttccagtccaatcctagatggaagctccgcccgacattcctcacgacgatcgaaccgcctgtgtctgtgcctagcagcctagtcgcacaactatccctgtcgccgatagcgagtcgttcctccgtcatcaccacagccactattgcttctacgactaccgtctcccagcccatccgaccagctcttcagagccgaacaagctctttgtttggacgaccccaggaaagatccgggctcgctacgctcgattggaaatatctgtacagaaagcgacgctggttggagaacagatggggcagatcagagcttgggaaagagactgtccttgagggtcattcagactctgtgtatgcattgcactttgacggttccaagattgtcactggatccagagatcgatcgtacgttctctctgtgccttcttatacttgcgaatgctttgtatccatcttagctgacagaaagatcaacataacaataaatagtattaagatctggtcggtggttacaggagaatgtatccagacgatctcaaatgcccatgacgcctccgtgttgagtttggcatatgacgaagaaactggacttttggtcagcggagggagtgattgtaaggttaatatctgggatctcggaggttagtcttttttgtttgtcgattgagattcgattaatgaacttacttatctcattgtttgatacattgtaggacccggagttcctcagcgggaagtcgtccggaaagcgacgatcgaaggccactctcaaggggttctcgatgttgctctcagtacagactatattgtttcctggttcgttccatctcttcatgcgaggatgggctgtttaatttggctcgctctgccgctgactatcctctgcgcatctcatttcgacttctctcagctcgaaagatacaaagctcaacgtattctcccgaacagactacactcatcttcgatcactcgtcggtcattccggacctgtcaacgccatcgctattcaaggcaaccaagcggtttctgcctccggagatggaaagatttgtctatggaatctcgacgcgggcgagtgtatcagggtgtttagaggtcacgaaagaggactggcctgtgtggactttaagggcgatttcatcgtttcaggaagtaacgaccggacgtacgtcatatgtcttttctccaacctcttttgttgctcacgattgatatttgactgatctggtcggtgttcgttgcgatttcccaccgaataggatgaagatctggagagcgtcgacgggtgagatgttgaagacgttagtcggtcatgaagatctagtccgaacgctctcgttcgatccaaattccggaatcatcgtctctggcgggtatgtgaccggttttcttccaaatgagagaagagaagaatgaaccagagcgaaactcatcaccgactttggttgactctttctgtcctacgaacatataataggtatgataaaaagatcatcatttgggatatgcattccggccagataatccgttctcttgaagaagatcatactagtttggtgtttgatcttcagtttgatgccggccggatcgcgagttcttctcatgataaacgagtggtcatcactaatttcggagatgctgagacaaccaaattatttgtgtaaaaggtttctttgtgtttgagattcctaccatctttctctctttctttcttatcacccacttgtttcgtcttgtcttacctcttcttctttgtttaatttcttccattttctgttgtgtcaaccgctcgtaaaaaagaaagaaattgtatccctttattttcctggtgtgacgctggtctcatctgtgctatctatatccatgcgcgttgtaactctccaccttctccgtttcagcctcgaccacgagctttgagctcctttgttaaaaggaaaaagaaaaaaagacccctataaagaatctgggaggtacgagaggacgaaaaggtatcattttacatttttgtactctgtatttatgttcatatctttccaagcacgacatcccgttcatcaacttccatcttctcgtctcctccatcgggtccatcagaacgaccgttcgtgttggtactagcgccagtagagaacacgtcgatacccgaagtaagggagttgatcagtaggttaagcctagatgatgtcaggcttggctcctgtgcgagtggaggagggaacagtcaaagattatcaatttcaataccagcggagagaaggcaaataatcagattgagggcaaggagggagatataaatcggttaggatccattaaacgaagtaagagaggagggaaagagaaacatggggaacgaacctgacgaacagtgtcgagatcttgaccaaacccgacaaccatcttgcccatccaaaactctctgaacttctttctcttcaactcttcttctgtatcttcttttgccaagtcttttgtcgagttagaagcagagtttacctccgaagcagcagggggagcaggaaggaaagaaggtctagttgaggtattaaagaacgaagggattctagccggaggaggtgaaggggaacgggaggtcctgctgggtttaggtcggctcaaagcgggtgtggttgtgttggtggtagaggatgagttcgggttgagggcaagtttcggttgggtcgtgtttggtttttgggtcgagcttgcagacgaagcgcttgatgaagaggacgaggacgaggcggaggaagaagaggaagaggaagacgaggattcatcactactactgtcgtcttcatcggcttgaacctgagcgaccaccgcagctaaagggacagatccttctgcaccaaaagctctttcctttcctttcgctgctcttgctgccaacaaagccgggacgagaggagcctcttcatcggatgatgaatctgaaccggacgacgacgaggaagaactatcggatgccacccgacgatttctctttcgcgctcgcctctttgtctttgtgttaacgtcctttgggggcattctttacctttaagctggggtgtgtagagggttgtgtggatgtgagcaagtaagtaagtgagtgagtgaatgtcgtgcaacagaagcaacaaatagcaatttcaagttttcaagctccgtcattttttcttctttttttttgggagtcgctcgcttttttccttctctagatttcaacactcatcaccagatccgtacaacacacgatgtctgcttctcttactttgcccgttagcctaggagccttgccctccaactggtccgagtcgtccaagtcggccggaaagctttcctgtaagagaattgttcttgtttttggtcctttcagccgcagagattgatactcaacttgctctttctttattcataagcccccactaagcactcgatcttccctgccggaccctccttcatccgatcaaccgttcgaaccaagctccagcgatcttttgccgaggatgacgaggtccactcttcccacgccgcttccctcgcttccaagtctactgaggaggagctcggacccgagtttgatggactcggagaggagcaggagagccgtgatgttttggatctcgacgcgaaggaatggaagaagcaggatcactacgccgttcttggtttgggacacatgaggtacaaggccaacgatgaccacatccgagtcgctcgtaagtttcttgatttctctgcagaagtccatccttccgaggtttggtgactgaacaactcttaacgtgtcttttcttctccttcccctgacagaccgacgaaagatccttcgacaccaccccgacaagaaggccaactccggagacgccaacaacgattctttcttcaagtgcatccaaaagggttcgtcggaatttattgtttgacctacgtctctattaaagtttcgccaactaatctatttttccatctgactgtgtagcccacgagacccttaccaacttggaccgacgacgacagttcgattccatcgattgggagatcgaggactttatccccgaccccaagtctgtcaagcccgagaacttcagtcagtattctctcgttatcttctctttaaccctctccttgaaaacaagactgatacctccactcttcgggctacttttttccatcctctctatagtcaaggccttcggacctgtgttcgaccgagagggtcgattctccaagaagcagcccgttccttctttgggcaacatggagagctcaaagcaggaagtcgagggtttctacgatttctggtataactttgactcttggcgatcgttcgagtggcacgataaagaggtcaacgagggatccgacaggtttgttcctttctttcgttctttcgttcttctcgctcttctctatataacggcgcgcgtctgtcggtgagaggctttgactgaccggacctgctttcgtacactgttctcaatccagccgagacgacaagcgattcactgagaagaagaacaagtccgagcgagctcgaagaaagaaggatgacaacacccgactccgagagcttgtcgacaacgttctcgcagtcgatccccgaatcaagcgaatccgagctgaggagaaggccgctcgagacgcaaagaagaacaagggaaaggcccctgtcaagctcgaccccaaggctgttaaggaggccgaggacaagaagaaggctgaggaggccaaggctgctgaggaggctaagaagaactctgtcgaggacaaggtacgtcttgtgttttcttttcccctttctttctcttgttcttgattcgtccttctcgtattgttcatcgtcttacggcctccctttccttttcattatcctctaggccgctcgtgaagccgctaagaaggccaaggaggccgcccgaaagaacctcaagaagttcaagaaggccatccagacctctatcactaacgtcaactacttccagcccgccggtcaggctccttctgcctctgcaattgaggcttccttgaacgagcttgattcgctttgcgcttcgctcgagccggaagaggtcaagtctgtcaaggatgatgtggagaaggctggaaccgatgctggggccgttaaggctgctttggcaggttgggttgccaaggccgtcgccgctggaaagactgaggacgccaagtttgttcagttcaagtaggagaggctcctacttgaatcatcttcagaagaggagagagattagattctctcctcttttctcatatgtgtagaccaggtttattctctgccgcaacttcagctagaattttagatcaatgggctattttctaattgtacaggtcttccccttcctcttctttcgaataggggaaggacctcaaagtgaaagaaaaaaagaatatatatatatcaaaacgtcgcttcgaacctagttgtctcgtttgcgcagagatacatgcgcttgatacagctcccaaagaagagaacgtttgatatgaatgcctcgataaagattgataagtataataatgattgataggcaacgatagtaaggtgacaacgagcgatccaacggtcttttgatttaatgctttgtcggctttgcgccgtccacaaacatgtttctcgtcgcgctcggcaaagagacagagatcccatccatctctttcgtcacgatcacttgacaacctagacgagatctgtttttttttgttggtttgcaacagttgcaatcgaggagggacagatgtgcgtacgtgcgcgtcaacaggaaacggaccgagaaatcaggccaaacaggaagagaccgagtcagcatgctacactaaatttctccaaatatggccaaaaaaaaacagaagagaggagagaaagagaaaaaaacaacgtacgtatcggttaagccgaaagcgaggtctagcatgtcgttttcctcatccgacggctcttcaatcgcatcgtacatttctggttcgaggataacatgacatgtcgaacaagcaaccgatcgctcgcatgcacctatatatttgttccaatttagggtgagaaaacaaaatggtcagattgatgatagcttttgactacgctcacataccccacttcaacggaaagccttcgaggatcaaccagaacggatactgttttgagaaggaacaaaatgaacagacgaaccttctagatcgacatcgtgctcatgggctagcgtcaataggtcgtcgccttcgttcgccataacttccctgaggacctttcctttcgaatccttgtagatgaccttgactctatgtagaccatcaatgaacaacaatggatgcaaagtaagcgagcagatcttgttcaagcgatggcatccatgggtagtattaaaaaaaaacgagtagacgaacccctttccaggctcgggtggagtccaatcaccatgaaacgaaactggtttcgtcggtgatcaccgagtcacaaaagatttttcccagaaaatgtgaaaggaagaaagaggcaagaaggaataccggatgaacccagagattatggagtccaaccaaagagagaagttatcaagagatcagtactgttgacaaaatcgttcccttgagtgacaaacaacggcaagacactgactaggagagctagagaacgatcggccggcaagagaacagggaaacagagtggttgaccgtctgagatcggagaatgaggaaagagctgatgctgatgaaaccgaagcgaaggcagaagttgaagagcaagaggctcgggaaagagtgggcataagagcacgacgagtgaacgttcggatagacatagtgtttgccggttagatttctcgattacgtgtgtgggtggatggatggatgaagtcaactagagacggcttaattggacaagggagccacaagggatattcaaaaagaacagtatgagtacacgatctcgaacgcatagagttatggagatcatacgatcctacctgaaacgaaacgggacaaaacgagacgatggctgatgggtgattggcaaatggttggatgagagaaagaaacgaatgaagaaaaacggatgaagacgaaaaaaatcgcacagccaggccaatcagaacaccctctttcgatggaaatcctttctcttgcgctccctcatccatcacgtacactagcatcgataaacacaccatgagcatcaacgggctaggctaccagcgaccaggagctggaattgaggctcaggatatatcgagtgtgcggtcgggcgaagacgttgccggcgagtcggcaggaaagacactaagcgtcaaggtcgagttcgggtaagcacctttccttgctcttttcgcttcctttgctttctctcttcttcttttccttcttcctcctgttcttctgctaaggaaagagacatcttgaacaagatcatgatatgatactggcaatctagaggccgaaccaaaatgactgaagcagccgttcaaggctaggctggatagaactcaccttctgtagactacacaagctaaccaagaaaacctccttgttcatcttcatcaaccttgtgattcttcaaccttacaaaacaaatcagtggaggactcgacttgttgttttctaaacagcctcgacacaacctcagaattccggcaaccgcaccttcaacagcaacgatggctgaacgaccgaccgatatgaggttcttgatcgaatttcttgccaagaacgttctccaggagagagaagaattatttagagagggagagactgtgtatgtcttgtctttctcttcccggggaaggaaacgaacctattaccctgaaaatctaactgaacccgttatctgtgttggtctgggcgatctttctctctacttcttttgaactccttgtcttggaacggacgaccttgtcctctccctgtcacctctcacagccgacctggaattcttgtgttgatcaacgatagtacgtatttgacttgttaggatcgagagtcaatagatttgagaagatgcgcgatgttgttctgacttagtcgataacttgtcctttcgtacattgcttgtacagccgactgggagttggagcacgaactagagtatgtgctagaggatggggacgagtgtgtgtttatcagtactcttcatggaggttaaggctacaccgaacgatcatcttgcctctcatatgtcagggagagagagaaaaaaatagacagaataacatagaatcaaggacggttatatgatttacaacatgatattacaaactttaccccacaatacagaacgaaacggcatccttgttggtacaccgcaacagattataaactcagagcttggctggaacgatctttgtcaacagctttccctgatttccaccggtatagagcgtatgccacacttttggcacatcccggaatggagcctcgacaatggtagacgagtcctcggtagaaatctttccttcaatcaccgcctgggccagctttgcggagaactctttgtactttttcgcaaagtcaaacacaataaatcctgcaagaagggggtaagggaggaaggtcgatcaatttagagaagcacgcagaatatgaacggagaagaaaaggacagatatggaagaagaacgaacgaaccttggatggtgattctcattgaagtgacctcaaagtagttgttcaagttcatagtcgtcgggtcgttgtagcctacgtcgccaaggtcgagttgtgagagatgaatttactaagagcgccatgtgtatgtatttccgagataaagcgagataagatagatattacataccactgatggcgccgcaagcgatgatcttcgaatacctagccattcgcttgaacatcaagttcaggatttctcctccgacattatcgaaatacctatgttgttgatcaacaaggatgtcacgctatcagagcaggccagctaataccagagagaaaatgagaagtaaacgaacagatcgacgaaatcaggagtagcagcgataagatctttcctgaacgtaggcgacttgtagtccacacactcatccgctccaagctttttcacccaagcgcacttctcaggtccaccggcgataccaatcactcgtttacagccgacgatgttctttgcgatctgaacgacaaagaacaaggcacagagaggatcgatcggtgttcattcttgctgtacggataccaaagaagtggtggggaggaaaaaggcttacttgaatggcgacagatcctgtggcacctgctgctccagaaataacgacgacctgatctttgtgaatcttgccaacctcgaataacccaccccaagcggtcattcctgtgcgcataggagtcgtttcggataggtaagccgtgtattgatcgtcgatccttgacgagtagagcaagaggaaaagtcaggcttaccagtcattcccagacagcccaaagcaagctcaggcgccttgccaggtatctcactaccagtaggagagaagtatgaaagaggggtgaaaagaaaagtcaaacgtagcaaagcagatacaacctcagcatagtcttcggtagattcacatcagaagacactcgcgatatatatgtgatatgaagactcacggcacacggacgacctcggacgcaggaacaattgcatactcggaccaacctcctccccaggaggtcaccaacgtaccctccttgaagtcagacgatcgactcttgataacttttcccaaagaaccactgagaaaaccagacgtaatgccaggaagatgaaaacaaggaacacattcttctttagtacgattctgtctgtctatcctgtttgctaagaacaaaaaaaaagaagcaatgacaacgacaacagtatcagaatagaatacccacctggccatgacgtctcctttcctgacaacaggtccgtaagcgcgctcgactttcaacccggcctgcatccaagttcgctgagcgggatcgttcgagaagaaaagactctgtagcagtagttctccatctttgagctcgggtatgggcaggtctttctgaagagagaacgtatcctcctcgaccgcgcggcggggagggttactgacgatccacttgtcggaggtagagggaacggaaggcatatcttgaaagcaacagagaggagtaatatgaaaggcgatgtacagaggctagatacgttcaacagagatcgaacaagagtgaggaatgaaaggacccatcctgggaatccatcaagactaaatccttttaaaggcagaaaacgggatatgcttagtcggcctgaacgtttatcatttaccgattaccggttaaaagaaggccgataaatgtcacgtgagaaataagcaatgcaattcgccgagtaaccaggaatggtaagttgctttgtgactatcgtaacaacgttcgggagcttgctaaagatgtctccttattcagtccgagttgaacataagtattcacatgaagtgacactacagatgaaagagggactgccgagtttgttcattgattcattcatattatcgatacaagtgttgcaaataggaagactatgtaaatgatgaaactaggggttggttcgggaagccttatcttcatcagccttgttggtgagggcatcggcggatccagaggcggcagaggcggactggaaggagtacacgcaaagaacggtaagcgtctctgatgaggttgaagcacgagaaatagaaataaaacaaacctcgtcggaagatcccttctcggtcttcttgtaatcctctcccttggaagcaaagaaatctaatagacgcaatagaaaaaggagatggattagctgacatgcagcgagtgcgatttgaaacaggatgaacaggaagactaaccaggtcgctgctcctcttcagaggcaccctggggcttgtcgccaccaacggatccctttccaaggggctgggtatcagaaagctctgtattggcaaagagatgacgtttatagtagagaacaagtaagagaaagaagaaacaagtgaaagtcagtaagagtcttcttgtagaacacatgcaccatcctgatctttgatgagt

SEQ ID NO: 3069 - DNA, 9291 bp, Xanthophyllomyces dendrorhous
ttgatgagtagatggaaaatatgagggcttaaaaaaaaaaaagagagatggactcatgcgcccgaatactgactaggggagggaggtccaggctgagacattgtcgagagagaaatgtgtgttgtttttaaaaaggagttggaagtgagtttggagtggtggctagagagaaagagtgagagatgagatgaaggaaagaagaagagaaagaagaaagaaaagaaggatttcctttttcttttgaaccgtacagatggagaaatccgatagcctttctggggtagttctcattcttacgtcattcctctctttcgcggaggaccggatgagagccagctaggggtgacgttagatagcgatcgacagcatgaatcattcgaatgaacatcaatctagctagctggctaagtagtatttcatcccatcttggttgatgcagtcttaattgccagacatgttgctgttgccaaccgaaagaagcatcccggtgtccaagttccttctagcgcatagatcgtttcccccaccttgtaggcatcatcagatagagaagaaggcacagacagatggttacgagtccttattacgagaagtaacaaatgaaccatgctgcttagtcatcttgcaccatacgtagcaccgatatcgatggccgtaaccattcacagccatggttacgatcctaatccgtccgtctcgtctagagggatttttctttctgatcatcttctctgactctttggctttctcactctttcacacctcagctcagtcgatagtccaacgcacacaccacacatagagatgagggcatctctagcacatcgagcctcgcgctcttatctatcctttgctcgatctcaaactagcctgcggtcgaacttgatttctgctaccaccaccaccgctaccacccggttccttgtccaccctcgcgctcaactccaatcccggacattccttagcaagcttcttggaacagccgatgacgagcctccgatcccaaagaccacacctcttgcacctccgtaccagcctgctccggatccaaagatcattcttgagcaggataacttgtttcacccgctctcgacctcgccttttgaggatctaagaatgagggcagagagaatcaagatgatggccccttgcccagtctgtctcgatcacttcggagagagaaatctggtcacgttcgactcgcctcaggctggttggccaacacattgctcagaggaacactatcttgccgatgaggaacatggcaagtatgtagacaggctcagagaggcaaatgaggatgagcatgatctcagatccggaagatatctggccgagtttgagaacttgcccggttcgtctccttctcttcctccttctctcttctttctccttgactctcagcgtcgtcacctggacatttgattattctttattgacacaatgactgacatttgtccgcaaatcgacatcctgaaaccaacggtaatgtaggtttccagccgtacgaccaggtcgttaactacaccaactgggatacctttttctacacccgaacattcccctccatggacaatctccgtgtctatcgacacatgaccaaagttcttacctaccctatcaccattgcctccacgcttgatcagttcagtccttaccttaagaaaactggtcggctgactcaagaagggcgacggtcaatgatcggtaagaagccttcacgattgtctggtgtaatttgattatgtagctcacctgatgcctctatcttgtctttacaatacaaaacaaacgaacgcaattgattcaacgataatatacagcccttcgatcgactcttcaccctgagcagactcctaagcctgttcctgggctcaacaacgtcgtccgaatctttatccttggtgctcgatcggaatcgtctctgcctacggccaattgggaacagctctctcgaatgttccccaaggcggtgctgaaggtatactttgtcggtccccaagctgcgttgcccagtaactggactccaaagccgacgtttgagagcgagaacgacccgctctacgaagaggagatggagaatagacgaaaacacgaggaggagctagagagggagcgattgaagtcggaaggagctgatccctttggtttcaactcggctccgacaaccggacaggccgagacaaaggcagagcccaagaaggagagcccattatcgaactcgccagccggtgcgaccggttctgttcctttctcgacagttgatcccacctccccagccggacccgcctctgcccctactccgtccgccccagccaaccctcccgctgcgccctcaacttcttcggtgacaaagccaaaattcaggtcgctcgatcatctccgagcggactctcctgaccgtcaacaatacccgtacactgaaagtctggccgatcagtcgatcgcgcctatcccctctcaacttgaccgaaactctctctcctctaccgaagggtcctacggcccgacgttcttcgttccgcccactcccgccctcgttcacgtgaacggaccccgaacgaacattcccggaagagacgaatctgccaactatggtgtccccgcatggacgattccgatttcaccagagatcacagtgtcctcgatccaagcgccttacgaagcgatccacgatcagttcggtccttttgatccgtactcggatgtgttctttgcgttctcgcccggattcggtttcccgtccagtatgtcacccggtagactccaggttcacaaggacgccgaatggggagagacccttcctttgatattggagacgaagtgcccgttgtttgttactggattttcaccaaaagatgtggagagagatgtcaaatcgttggaaggattggaagacgtggacggccagttcgactggctgctcaaccctggtgaaaacttcttcgctagtgagagatgggaagtcgccgacttcgatccaagagtcatggtcaagaccaactggggaatctggggtatcaggtttgttccatcttttatctttcactcccttcgtttggttcattgcgtccctttactaatcatgcatgtcattttttggacggaatgataatccaacagaggaaagatggactctcttaccaaagtcgaggaggacaagtggggattggtccagaagcagactaggaagctctgagagtgatggagaattattcatgtcgtttcaaatttaattcgccttctcttttcgtccgatttcagtcgctgtttccttcgttctttgttctgatgtctcttctttgatcgtagctttttcgcattcgacatgagaaacagagaaattggctcgtatttctcttcaccaggaaccagaatgaagtcctgatgatagctaagtgggagatgacatgacatagaatacgaaaaagactttttttcgggactgagacttcttatacccgttggctcgaatcgaccatcttgagaaagacgcgcgattcaaaaggaatcaaaacacacaagacgaaggataagcattccgaacgctacgaaagggaaagaaagttatgatgtacttaccctaaccaaatccttggaatcgatgacctgtttcccaccccctgataacatctcgacctgccactgttcatccgtctgatagaccgtgcggacttctctgcccctaaactgaccggcgatcacacaggccaactgttgttccgtctctggttctacaggcgccaaacaatcgggaggaatgttcattccctcggaacctaactggacgagtaccgtcttatgtccggcttgagcttcttgaaggattccagtctctccgttgtactttcctcggaggtactctgcacccgtatgactctgaatgactcgaactataacgtccttcaaccccactaaccaatcaacagctcgacctgtgtgttcaacaaagagaattgtcggacggaaagaaggaacgatgtttatgagaaacggcatacagacagacgaaaactttagagaacgagatgtttgggaaaaccttacctgaagaagacattggcatcatgcctccatggtctctggcagcacccggcgtaggcgcagaaagaccaccaggggtatagtatgctccgggggtagtcgcgctgaacgctccaggagtgggtgcagctccaggagtaggcgcggcgtagcctgcacctggagtgtatccggatgctccaggtgtaggtgcagtgtatgctccaggagtaggtgctgccagagctgcaggagtaggtgctgccgttcctccccatgcagatgtcttcatgtaggtaacaaggagggagaaaagaagaaagacatcagtccgactgatacttctcagtagttgtgttccaaaaaagaagaacatacctcgtagccagtattcagatgagatccttttgtatcgtcgccccaagctgcataagcaggttcgttattcatagcagaagctcccgcccccgctggcgtagcgctcgtcgcgttccaagccgacatcccagctcctgccggtgtccgactggaagatgaagttccagcaccgaacggcgttcggctatctgcactccatgctggtgttcgagctcctgatcctccgtaagcgggagttcgaccatcatttgcagcgtaacctggggttcggttcccaactgcatacgcaggcgttcgtgcgcctgccaagtgaggtgtcgcagctccggcagaccaaacaccaccaggcgtagctcctgtaaatcaaatcagttcataaaaataaggaaatggacgagacggtcaaccaagtttgctcttttccgacacggggaagcagaagcagtgagacttaccaccataggcatttggcgttttgccgacgttgaaagccggagttcgtccaccactggaagcgtacggatttggtgtacggccagtgatgcctccagaatatggagtagaagaagaatacgggttgagaccatagcttgaaggaggggccatatctcttggtgcaggtcgagggccagagttggcaaattggccagagggcgcgatcagttgggatgtagcgcctgttttgggactgggaataagaatagccgccgtgccataagtacataggcgcaggaagataggaaagctacaaaattactcactcttttctcatcagagcagatttgtttatcgtcacagtcttgttggatgattgtagctcaaccctagccatctctccattgatgtctttgattaacccaactaaccccttattaatccccttaatgatgaccacagtcgtatccgtcaaacgatcccttcctcttgatactggaccgccagcattgacgggattcatcttgaggttggcgattgctgggttgagcgatgcaaagtcagtcttgaccgcagcctttttggaagcttcggagagcaatcgatcggatcgaagaacgaaaactccattgttctccaagatatcagagttgtgaacgaaaacgtagcttccccgatatatatgaaggatctgtccttttcgaggctgataggcgcattttcaaaagataacgaaattaacaattctgtttttgaaaagtaagaaaagaatatgatgaatgccttacgttatggtcaactcgttcttgaacagagtccccgactttgaggttcactccagttgcatcgctcgcatgagtaaacctcgagtctaatttcatgttaacctgcccaggcttgacaatctgagacgttccctcctgatcaatgacctggaaagcttctcgctccaacttgcagatgactccaacgtttctagaactgtttgagtttgacagcagcaaacccatagatagaagagtaagaacagatgcttgaagttgaataagactgatgagcttgagacatacgaaagctggactaaatcatgaagctcgtattgagctaccacagccgaaccgtttccaacttcggatgcctcacggatatctcgcgcgaatacaacaacctagagcatcagaggatgatacggacgataagtacttctgagcacacattttatatgacgaaaaagaagagaaaaaggatagataactgacctcttgttgggacaaatcagacaagaagatgacttggttggctgccaccgagatgattagaccagtctcattcatattctttccagagataaccttgatatgatctcccggcttgaagttctttctgactgttcgtccaggagccgtgataatcgttccatccagttctccgtggatcgctttaatagttactgtctcgccgataacactttccactaaacccaactgtccagcctgctgaccctcgaagatctcgacattgtctcctggctgtaaaccagagatggccgcctttcttgaagcttctgagatcatcgacagatcctgattcgagctgagtccaccgccaagagcgtcggttccggtgaacatctcgatctcatccaatgtaggtttcaccatttcggtctcgatcgcggtgatcttcatatccttctcgataaaaccgtttcggtaagtctcgccttggaagacaaacgcgccccctctcatggaaaccgctttagaggtatatatcttggaaacctcctcctgattgaaatacttggcctcgggtcgtttcgatccggacgcgactgttccaaatccccccttctttcgcttcttgtcggcagcggcagcatcatcggtcggggagaggtcgattctaggtataaatttgagtccaacttcgtctccattctccgtcacgtctagcacttgagcgagatcaccctggtactttccacgcttgattcggacccacgaacctggaagcgggtcgacccggatctgcttgatcttaagcaaaggagccatctcgtccagagggaccagattgatccctcgagagatgtatactccaacaagacctttgatggcagcttcgacgtgaccaggagatcgtgcttctacgtagataaggccggggagtgtatccctctggaaagcagagtaaatctccaatggtgtggaagaaaactcaaggtcgagtgccttctgcattaagctgagcacaatatctttttctcgacccgtctgtagagtaaaagcataatcagaatgatttagtcttgatatcttctgtatagcgcgtcaaagatgctaggagaagaagtgggcgtagaccgaccttgactctgagctgccatagatttggatcctccacactaggcattagcagcctctgaggggtgtgcgatgagcttcctttaaacctggcttgttgactcctgctgtgtcgctctttgaattcagcggcaattagctcggcgtctcggtcgtccatctccattcttcttcggtcgagcttctggtgctctctctcaactcgacgagcgtcgaatccatcttcgcctacgggtaaatcctgatcgatgaaaccctcgtctagaagttattgggggatgaaggtaagtcgaactatatgctgaacacgcgaagactttatttaaataacggaaggtaccagtacggtagacttactttctcgggtgtagtcgtcctcatcttcgtccacgtcttcgtcctcatcatcgaccacgacctcaagatccaggaacttgtttcgcttaaacttcttttttggctgaacgttcgagttttatgatcatagagcaagacaaagacggcatggacaatgaggtgaatgctttagcgagttctacacatgcatacgagaataatagattctacgcggatagaagcaaaaacgatatactacttacacgtcttcgacctccgttttgctcttcttcatcatcctcttcatcctcttcgtcgtcttcatcatcttcgtcatcatcttcgtcgtcgtcgtcttcatcttcctcatcctcttcttcgttgaccgctggccgggttgtctggttgggtgaaatccatgaaagtggaaacatgttgtttcagttaaaatcacccgaaggaaatgtattctcgttatctgctccagctaaattttcttcttcttctaatccgactcgattcgagagacaagagaagagttgaaaagaaaatgccaaaagacttaccgaaacctgttctgctgatggctcttcatcggactcatcctgtctgttcaattcgtctcgctcttggttaagtttgacatcgacttttaggtccggcttctcctcgtgcttcacgcccgagttgattggagaggacatgactgaacgagctgatccagatgatggtatgtttgatggaccggggctgaacgtacaagggagattcatccataaacggccaaggggcaggacgtacaacgtgatgatatttgattgatggaatttcaagtagttagggttctctaaggattcgtctagtatcaaacaattcagcaagcttcatcatatagtcttctcctccaacccaagacaaccagatcctccattatgaccaggttagtgcttggtactcgctggataggctgcttggaacgttctgttatgtatagttctagcttgttctgctcgatgtgttctatttgaggcccagtttttcatcagattcgcgtaccatcatgtcctccacacgttgtggacataaacgtaccatgctcctgacaaggcaatctttcgttctttttgtgtaatcgattcacccattagacacgccaaaaacagccattcgtgagtatccttttcacttgtgttttgttttcaatgctttgtgtgtttgtgtatgggattcatgtttgtcttgcccttattacagttcaccgttcttcacataccatgagaagtctatgtatgtcgtccctactttccgttcatcattttgtccggtcgcacccggataggagcacacacactaaacctgttgaatccgtgttcgttataaaaggcttccttatggaaccaagaaggttggtttcattgtttctgtctcttgtactacccattcgcgtaaccttatccacccttatcttgatgacataaatctagcaacgactaggtgccgagagtttcagaaagtttgatgcttgcatgctttgcaatagtaccgtccggaacccatgcgcatgctctgatggtcacatctactgtcgtgtaggtagcttcggtgtttcttcatatcgtgagaggttccgattgactgacctctggttactttccctctcttccgccgcttcaggaatgcatcttggagtctttgctatctcagaagaaactcattaaagcccaccaggacaaccttgaacgtagaagtaagg

SEQ ID NO: 3070 - DNA, 38140 bp, Xanthophyllomyces dendrorhous
aggaagagaaagccaaggcgagagaagacgcaagggaacgtgttctcagggatttcgaacgcacgcagtctggattgggcgcaaaggtcggtggtagctcgacaaccgggacaccgtctgggaacgcgtccaaggttgagggagaggagcgaggacagaaaaggaagtttgagcttgatcaggcagatatcgatcgaatggctacagaggctgaggacgccgctttggccaagattgagaaggagcagttggaagctcgaaaagcgaaacttccggctttctggctgtatgtttccctcttttctgtcggtctaccgttcgatcaagttctgctctctgatttactgcctcttgaatatgacagaccgagtttggcaccggatgctggaattgagaagatcaaagcaatcaagatggaaacgatgtgccaagcctcggagcacccccatcctctaaggtaggttatcaggtgtgaatatagacatgcgtacgatgattgctaatgtcggtggcgggtgctattttccaatctacagcatcaaagggctgatccctgtcaagtttacgccgctccctacgtcgtcgagctcgactgccggttcctcaaacccaacagcgtcgatgtgtccttcgtgttcgaaggaactgacaaactcatctgtttccatcctcatcaaggtctgttggttgtcagaatacgagtttccattcttctcttcctggtttgtttagctgacctgtgtgtatatgccggcaatgtctccacagacttgcggacacgtctgttgcaaggcatgcgtggataaagttgtccgaccggggaagcagtgcgtgacatgtgactcgagagcaaaggagaaggatttggtcgagcttgtcagggatgggactgggtttgccgctgttggtaaagcagaagccatcaaggtttgttctggattttgcttttcttcactttacgatgagcatgttctgttgaaagcagtactgaatatcgttctgttttgtgtgtatgtgtacacgttctttctttttccttttctttttctttatggaatactgtagcaagaaactgctttccagtagaccagatatactcaagaagtgaaaaccgaagaaaagacagcagaagacaattgaaatctgggtttgcttctcaccgaaggaggagtgtttcggctttgagatctattccggacgacatgcggacaagcatgttggttgtacgatatttgtcaacagactgatccgcatatacgcatggtacattaggagaagcagagagagactcatagacacaaagaaacagaaactcgcgtataaagagtagaagcaaaccagtgcagatgatggcattcccacctaccaaggcatcagaaagtgatttttgttggggtgattatctgttgctttcaatactattcggataaacttcacacgccgggcggttccggtaagtattcttaaacgggaaggactttcaacggcgggacgtcaccaaccagcccggttcaaacaggtttgatctggttcgtgccggttcgatctggttcatccagacgtccgcgcagtcgatagatgatatcccaagccatgtttgggtgtcctagcaagcgtgcatctattgacttctcgcttacattctccatcttcctcttcctctcgttagagttcattctcttctcttctccgtctttgacactctttccatccatactttataacgactaaataggcttggtcaacggagaacatcaaatcgtaaaaaagcaagcctctcctcatccgaaggctgtcttgctctggcctatttctatctgtcgctagtccagcgttttagggttcgtacagcttgaactatccaaggttttttctcgtctaaaaaggaagaaaaaagccgaaactcatagagaaatagcgtcggcgatgagccatgtgtctgaatcgctcttgtgactgacttccttctcaaatcgcatctcttgatcctcctcttctccttcctgtcctctagcagcggccgacgactcgaacgccgaagcgtttcagccgaacaacatcgtacctttccctccatcttgtcccgactcatagcctctggcttctagtatgatggatatttccaagccttctattctctcagcagatccaagtgaagcctttcaagatcatcttctcggtatcctagctggtctagccaaatctattcccccaacctcacttcagccgatcgagttacctccttacagagccccagatgcgtcccttaagacagagacaatcttggcccagctgggcctaatcgcctccaggatgttcgacgcagaagccaaacaacaccactatgatcatactcctgcggctgtcctccctccactttccacgatgccaaacagatttacgctgaatcagccgatggacattgacgagcttccatccccccctcctctagacccgcctttggatgtaaaccttttgacgaggaaagatcttgtagcctctcagccgatgagtgcatcaaatagcttgtcgggagaatccatcctgacgtctggtcataatatcaattccggagcatacgagagtgggctggggccggtcgaggaacttcggctactacgagctcaggttcaggacattgctcgagtctgtaaggtatgttggccattctcgaatccaatctagcgcatgtcctgtcaaagcatacacaatgtttatcgtgctaatatatacccaacaaacttaatgtacggacaatcatatacgatgcgaacaggctgttgctgctggtgatttgactcagaaaatcgtcgtcccggtagaaggtgttgtcatgattgagttgaaggacatcatcaattctatggtctgtaatcttaacactccaccccgtacttcgtgtcagcctttaattctgaagatatatgttttggacatgtgcgcatgtacgtgtatcatcattcgtctcaggtcgacaacctcttcatgttctcgtcagaggtagagagggtcagtgtggaagtcggtactgaagggttagtgatttgtatacgatcctgctacgtcgattgggcaagcagagaaatttgtgcgcctttgaaatgagagaactggatgatatctcagaccatttttgatttcatcttccttacagaaaacttggagggtcagttcttttctatactcgcgtcgatcatgtgtaaagattgaagattaaaaactcgtggtatctcttgtatctgtgcgctaataggcaagctgtggtcgaaggcgtccaaggaacctggagaaacctcacatctgtcgttaatatgcttgctgctaatttgacgagtcaagtacgagctatcgccaaagttactaaggttcgttgacttgctacttacaacagactttgcgttgggagttatataggcccagctgatgttcactgtctatcgtcatcttcttttcaaatccgagtgtaggctgtagctgtgggagacttatcacagactatcgatgtcgacgcgagaggagagattttggaacttaaactgacagtcaacaacatgtacgttacatatacaccaattctctgtctatcaattcagcttcagctcttgggtcttcttgtttaaaatgggacgttcggtcgcctatatgtgtatatacagggtattgcaacttcggacacttgcagacgaggtgtcacgtgtatcgttggaggtcggatctcaaggcaaactaggtgcggatctgttctctgatttagatgtcggatcagtcacatggacactcgaaggaattaacagcgtatcatacttgggatccaaacaggcggacaggccgttgttgaaggcgtggaaggtgtctggaaggaattgactcagaatgtgaatatgtttcctctctcttgttccttttcatctattcttctctctagactcaccgagactcttgacaaatactgtatccaattgtttttctaaggtaaatcaaatgtgtgcgaacttgacagcgcaggttaggtctatcgcagcagttactactgccgttgctcgagtacgtgtcaaatacccgttttcaaagttggctttttgtttctgatgaaactaataggatttgtttctcgatcgctaaaatagggtgatcttacaaggacgatcgccatcgaagttgatggagagatggcgaccttgaaggatactgtaagtgaatctgttcgtctcctcaagagcatgcgcggtcaagtcgctcatcgcgtgaataaatttcttcggacattctctgtatgaccaggtcaactcggtatgtaccttctcctcgtgatcgggttatttaaatacgcgctcaggtcgctaacatcaaagccgtttccgtaatctctcagatggttgctcaattgacgatgtttgctcaagaagtcacacgagtggcgctcgaggttggaacctatggccaggtctgtcgaatcctcgtctttctttcactatcacgaacaatcgtgaaaccccactcaacgcatgtatgtttctatgggatttacggtttcttgtgctcagttgggaggtcaggccgtggtagagggagtcgaagggacctgggctgatttgacaacgaacgtcaacgtgagtggtcaccgcattcgttcccttctatctttgctcacgggactgctcactgatcttgtaaacacgacgtgaattgagctgaaatagaatatggcagcaaatttgaccaaccaagtccgagaaattgcacacgtggtatgaaatagatactcatagcgttcgaagaaatatgcctctatatttagtggtattcaagctaattccatgcttctggttccccgattcatagacaaaatcggtagctcgaggagatcttaccaagacggttagcgttaatgtccagggagagatgttagacctcaaagtcactgtgaatgagatgtaagtcttgttcgagtcttattatggtcttattcgagcccggtcttactgcctcgtgctcacttccgcttggggtttcatgtatgcgatggactgccgtgtctaaatatagggtgagtacctcttttctattcttgtgcacgagcccttcttcatattcagccaactcacaatgatacgcttgttgattcggatcaggtgggtcaattaacgactctagctgatgaagttactcgagtgtctctcgaggtcggtactgaaggaaaactaggtggtcaggtacgtcttttgctgtcgtatccagcagctgctagacgtttaccgttgattaattttggtttccttttggtattacactcttcgttcaacaggccgtcgtgcacaaagttgaaggtgtttggaaggtaatctatttagttctccactcttatttgtttgaagattaattccatactgatgctttctttcctatccatcttacaatttttcaaggatttgaccgacaatgtcaatctaatggtatgttcatccatcgtatcaggatataaacaactcatgtcttccatctttacaacctccattgaccactatccatctatcatctttctttaggctttaaatttgactacccaagtgcggtctattgcggtggttacaacggctgtcgctcaaggaaacttgtccaaaacgatcgatgtaccggcccaaggagagattttgcaactcaaagtaggggtttcttctcagtagcttccacatatctcgaggcgaacaccaggctaacgatgcgacacgcctcattgacttcatttaaagaacaccgttaactcaatggtggaatctttgaacaacttctcttctgaagttacaaggtctgtagattcgtacatcatcgacgcgcacatatatgcacgacgatactaaattgttctttggctgctgggatcagagttgcaaaggaagtcggaacagatggtcaagtaagattgatgctcttctgtctctctttgtgtgaatatttcattgaaaagatgaccagcagctgatgttcttgcctttgtgcatgcgtagcttggtggtcaagctgtggttcacaatgtggagggtgtctggaaggtctgtctaaaacgtgaattctaacaagatgaatttgatggactgatcagcttctttgtgccgtggtaaacataggacttgaccgagaacgtcaacttgatggtatgtttccctcaaactgaggtcttcaacgaacttgaccaaccttgttgtttcaattgtcaggctctcaatttgactacccaggtgcgatctattgcggccgtcacaacggctgtcgctcgaggaaacctttccaagacaatcgatgtgcctgctcagggagagatactgcagctcaaggtaagtatttgtgttcagtctgactggccattaggcggtggtcctctatcgaagctcatcatttagggtttatatacgtctaggacactgtaaacgatatggtgtattctttgaatgagttctcatctgaagtgacaaggttagtcgtatcgatcccatatatcaaccgtattatatagcacgcgtttaactaaaccccttcctcgtacaatgtcttccactgacagaatggctaaagaggtcggaacatatggaatcgtatgtactgcgccatttaaaaatacaagtaggctgccaatctgacctggtgttatcgtgtatattcagcttggaggacaagcacaggtagaaggtgtcagcggggtctggaaggatttgactgatagtgtgagtccaattcatctacttcataggggttcactgagtctcaggcttaaacatctccattcttaattaggtcaacaacatggccaccaacttgacggtccaagttcgaggtattgcgcgcgttactgtaggttcttctacataccgacacagatagctagtcaatctaggaggttccgagatttttttctgatatatttcaatccacaacagacggctgttgctcgaggtgatttgactcagaaattcgagggagttgctgtcagaggagagattttggatttggtcaacaccatcaacggtaagccgaagaaggtttcttgatgcaagtagcgcggataatggctagtctgatcttgaccaaacatttttacatcataaggtatggttacctctttaacccatttcgcttccgaggttatctttgtcgcaagacaggtgggtacggaaggaaaactgggggtacaggcaaaggttcagaacgtagagggaacttggcaggaaataacgttcgtatccccttctcatattgcattcgcctttctgcgatataccaactggctgtgctgattgttttattctgcttgtagatcgaatgtcaatactatggctcaaaacttgaccactcaagtccgagctttcggccagatttcggcggccgcgacgttcgttcctcttgtttctttaaacaatcataacgctgcgcgcatactgatatcatgaaattgcattgaactcttacagagacggtgatgctacagagtccgtccaagttctggtttccctaggatggatgcttcttgtctagctgacttcccttcaaatttcacaatcaggttcatcactgtcgaggcgagtggagagtaagtctatcttcctatcatttgtatgcagcgagcacgctcacttggttctgacccgtatccgaatgatgtttctacaggatgggatcgttgaaacagactatcaatcagatgttcgcctttctcatttcttagtttgctcgtcgctcgcctatctgattgtaccatgtggtattattaaacagggtctttaatctccgagagagtattcagttcaacaactctgctcgtatcactgccgagctggcgaacaggagtaaatccgagttcttagcaaacatgtcccgtacgttcctttacggctttgcctggtttgagtttttgcgcttatcgttattctctctacatctgttttgttcgaatagacgaaatcaggtaacattctcctgttaactaaatgcaccaaccaatgctgctgatcgcgactgacttgattttttctcatccagaacgcctatgaacggaatcattggtttgacagttcttacactggagagcgagcttacacgtcaacaaagagaaaatctaatgattgtgtctacattggcaagttctctgctgacaatcattgacgatatcctcgatatctcgaagagtatgtttccatcttctctcatttttgagtaacacaatgtgatctacaggtttgctgtctaacatccgccttctccttgttttgtactctagtcgaggctggtcgcatgacgatggagacggctccattcactttccggccaactgtcttcggagtgttagtcgttcccccatccaagttttagagaggctacaggtttacatgttcatcgatctctgtttggtttcgcagtcttaaaactctctgtgtcaaagctgcccagaacaagcttgacttgatatatgatggtatgtgtttatcttctaaatagattttatattgaaattttaaatttagaggacgatctgattcgtttcttccctgcggacgcaaatagtggatccgaagattccggattgtcttctcggagatgctcttcgtttgaaacaagtcatcacgaatttagtcggaaattctgtcaaggtatgttgcatcacgtagaagaatacagtagttctctcgatcgtaagctaatctcatccatggtgctttagttcacgaccaagggtcaggttgctcttacgtcgagacttatcggaattgaagacaacttctgcgagatcgagttttgcgtagccgatacgggtattggcattaaaccagataaactcgatctgatctttgacacattcgcgcaggccgatgggtaagtcacatctgtcacaataaatctgaggtttgagtaaacccactcatgcttatctggatcattctctttcgctttaggtccacaactagggtgagaatttctttcagttccaaattactgtgttaggcgaaggcattctcaattttgctgtcttctctttttgcaacagaaatatggaggtactggtttgggtctatcgatatcaaggaagctggtagctttgatgaacggccgtttatgggtagagagcgaggttcgtatacagacctcttttaccagctgtagtttgcgtgcccctaaacagttttgcctacgtttgttttgcgcagtacggaagtggaagtcgatgtaagtgataaatagatgtggatagaggacgttgggtttcaaattgacttttctcctcttctcatcactcatgcggtgttacctcatcacagtcttctttgtacgtataagctgcactaaatacggaagaagattggctatcttactgaacagcctgcttttgtttgtataccaacagacgacacgaacagaaatcagtgaagttcagccaattacgatactagagagagtcgctccgtgagtgattctgctattgtcagatgtttccatctgatctcgactgactgaccccttttgaataatattcaacagctatgcgggccgatgcattttattcatcgatactctaggagacaagacaggcgtgtgtgatgtgattgaacagctcaagttgaagccccttgtcgttcactctgtcaacgatgtctggaacttgaagagtctgccagaaggcaagcctgctttcgacacggttattgtagataacctcactacagttcgtctggtcttgatatcttgtctctggtcgtatactcactgacctaggcctcgatctgtaaactcaaacaggctgaacaattgcgagaggtagagaatcttcgatatattccgatagtcctgctggcgccggtacgtgttcttcaatttcctctttactctttcgagacacgtctgctgacaaataaacaaataactaaacaaacaaaccaaaaaccatctgtgtttcgtctgctaggcgtcacgtccgagcaaccctcctccgccattcattcagatacctcctcctaaacgaaggttgttgaatcttgctcagccacaagaggaaggtccaccagcgattcctgtaaagagctgtctagacatgggtatcacttcatactgtactgcacccacaaatgttcaagagttgtatgtctactggcttagtctttatagcttgtgtgttttcaacgcctaacgtggtttacacttctgttgggtagattcaacgctttgacacctgcgctcgagtcgcatgtcgcggtaccaacttatcctgtatgtctcacatcttattcaatcagcgacctaccccctttttatgtttctcaacgtgatttgttctcgttgaatatttctttcatcaggcgaaggatatcgtgctggatattctgcttgcggaagacaataaggtcaaccaaaaggtatgtccaacagacgttgtgattgtttatacgcagctggggttctcattgagtttacctttacaattcctgtactagctggctgtacgtctacttgaaaacagtggacacaaggtcgaaattgccgacaatggtcagatcgctgtgaacttgttcaagggccgccatcaagaacgtcgttcatacgatatcatcctgatggatgtctcgatgcctacgatgggtggaacagaagccacgcgtcttatacgagagactgaggctgaattgggctacgggcgtattcctatcgtcgctctgacggctcatgccatgatgggcgatcgagagaaatgtctagaagccggaatggacgagtacatcaccaagcctctgaggaggaacgatctaattggcacgatcaacaaggttatgcaacctattatacagcgcaggagcgccagctcaggctcagagggcacggtctgatcgagatgtctcttatcctttttctcttatggggtttactatcatcattatttaggtttcttggtttcttgtgtctctttctccttttggttggtcttatcgtctgcattatcggcatcttctcttctgggtggtttacctgaattctcttctcttttggtattatctatcaatacttgctcttctcacactctcttcaggatcgttctcttctttctatccttattctttcttgtcttttttgagtggatacataatagaatgaacggcggtttcattaattgctctcctcttctggttcatttctggtgaacgcgtaactttctcgtgaaaccatcttaaactccagcttgatactcgacaatctccgactatcaactctcaactcactctcatccaccgtaccgacataacgaactatcgacctatctgcgtctaagaacgaggaagaaggaaaagaacaactagtgacagaaaataccatgtccaacaactctcaatctcaatcgcctgcaccagaaggaccagctcctactgctggctccccatctggttttttgaaggtaccgtactcgtcctttcgtccttattttcttagctctatacccattatttctccttctccttcctatgttccttttctcgcttgttcttggtcgaatcttataccttgtgatgacttgctcgaaggcgcatccgacgtgttctctggactgacgataatcacctcacacttacttttcattgctcgttatacgcgtatgcatctgcattctggaacgatgtcgaacgacaaataggccgttgtgggcaaggaagttgtggttcgattgaattctggagtagactacagaggtccgttctcatatttcttctcttcttcactttggatgcatacaatcggtttccttttaggttattgacattggcattgaaacactatgatgacaaaacccgccgcacacacccgtttactcacatgcgaacgtacacgtatggaatgaataggtattctgtcatgtttggacggatacatgaacatcgctttggagcaaacggaggagtacgtgaatggagtgaagaaaaactcatatggtgatgctttcatcagagggaacaatggtccgtgcttgttcgctttctcttcttcctctctgtctcttacaaaacaactaatcgtaccgagaaagtttcatttcttctttagtgctttacatctcggcttcggactcgttataaaaagaagagcgtgcactagatcctctggacgagatagatacgagcatataaaacacaatccaacagtctttttgtttcaaagagagagaaaaggtcctttctgaaggattgcatgcgtgagaaggattccttgacatgacttgttaagagaaagaggtgacaaggggcagattaagaggactacgatatgactgagaagaaatctcattatagattgatgtcgacttgcaatttaagataactgcttcgaattcgtgttgactatgtattattcactatccgctattcaccatatactgtctactactgtttgttgtgagttctcagaacaagagcgcctttgagctgacctctatcccgttgacaaccactgtgcccttcctactccctgctctacttccactttcttctgtccctgtctgagattctctaggcgtgtcgatacctgaagcaccgtcgaacccagcatcgtcgacgttgttgacagaaggcatggtggcttctaccagtctaggtctgattcctaaagatgagcagacaagtttgtattttgcccgaattctttcaagcagagcagagatatctacctcgggcgatgcagccgttgaagaggttggttctgtggaaaggagtgccggtgtggtggaaggtgctgaattagattcgtccggtgtgagtgactgtgtgggtggtatcgaagcctgattctcgggatcggatatgttgtgagtagggaagagagagatcaggtgaagaagttgattgatgtgattgatcgctctacttgccgacttgctatatgatacaaggggacacgacattgttcaaacggatgagctttgagaacaagagaagcaagaacaaactagccagccagccagccagccaacaagctatcaagcaagaaagcgaacaagaaaccccaacatacgtttccttgccgagtagatctctccagaacgtaccgacaccttcgtagaacccgacttcttcccagagttcgaatcctttctccttgcctaacgctctaccctcgaacaacccgtggagcgctccgtgctcgaagccttctctatagcctgtttgatagaatgtttcctccacatggttcaacgagtcgagcgaatcaaacaggtcggccatcgtgtctatgagggagtgtatgtgtacgtcaaggtgagtgagtaagtgaattgtgacgatcaggtacaggcatacgcacaggcgcaggcacagccgcctagtccgtcagtgccctgagtgttacgagcgtcggttactgggcgcagcatgtgcacagctttttaccgatacgcctcttcggcacgggtgcggccatctgcgttcggtctgtttattcttctcactttcgccctttcgcccttttcctatccttgcacacttacttcagtcggctttcctatccccctggttttttcagtcttgagttgtctgtggaactgcatgagatactcggtcttgggtggtcaatatctcgtctagaaggaaagaaggaaaggaagctcctcaggaattcattacagcgtcagtcgttagagagatctcggaccataatcttctcctgtttcttccctccagccgtgttttctcctctcttcctggatcttaccgcagtttatacccacatacaatctccttcaaagactgcagctcgtagcccgaatctcgtaatcttgcaaaaagattcttgagccctgctcgacgcgatgtccattctctcaagatccgtttcgcctagcatatcttcctcgtcctcggtcgggactagtggatcgatcacgagcctagccggcatacagtccgcctcatcttccgttagtgatggtcttcgagctgaaagctgggaggaaacaggctatcaggctggccttccttctggtagcgaggatgagcaggagagagcatggcgggatggtgtgacccttcgcaaaggatggcagtttctagacgcagcagccgctcaaagtgacgacatgggtctaggcaaccgaacgcggaaaaggtttagccatactgagggtccttccggcacgccaggacgtcaaagcccaggtggtttcaccataagcagttcttcgggggaaatgaacagggtatctatcgcagagactgtcaagccttcgttgtcgaacgtttcgagccacgaacaactgtccttcacgctcgaggggcagcaacaacaatcttttgtgccgtctccttcttccgactcgtcccatttcatgtcgccgataacaccgttagggagaaagagtagggcgtcatccatcagtgcgcttggtgtatcacacagtcttaccaaatcatcctcgtcatcttcatctccttcttcatcctcttcatcgccacccccacctccgccatcgtcgacgaaaccaacttgggtcgagctggcaagcccatcaaactccccggcatcagcatcgccattattctcatcatctttcggatttccccacagttcagcgagacattctccgcctctccaaaatattcaatcgttctctcgggcacaagcctacacgcccccatccggaacacctccgcctgggagctcctccactccttctctacccgcgaaacccatatggctacaatcaaatccgctgtcttcgtcactgtcacaaacatcggttttggagccctcgaatgccagttcatcatgttcaagtaccccaaagaaaccgtcgtcgtcgtcatcatcatcatcaacccgcaacggtaaaccctacactagctccaatcatacaccctactcgcaggctgtgacctcatctctctcgctgtcatccgcgccgcctttgcctcctcgttctcctcaaattcaaaagcacgtggccgaagccgagttttcttcatcttcttccaaaccgtccggtggtagatttggactcggcagtgggatcaaaggacggctggcagcgatcggcggtgccgtaggaggcgtggcaaccgggttttataacgagcgtagcacttacactccgtccttttccaatcagtccaactcgtcctacccacaatcattcaactcactttcctcctcctcttcgatttctactctctcgacctcgtccacgtctagcccttacctttcacaaccttctaccttccaacctgactcgtttcttccggctgtgccaaaacaacggacgtttcctcaagttttgtttagtgttcctgggtcagccgtcaggcactttaactcatcttggcgagcccgagcgggttctccttcgtcttcttcgtctcttgcgagtcaagcgtcgtctactacgagcggaacggtgtttcaatggaggcagggattcccaagacctattgtgtacgacccagaggcaatcatcccgacaggaagcggcgcccgagttttcggaaggaacatcgatctcgtaggcagggagtgcggagttgccccggaagataaggacacggtcggtcgattgattggtcggaggtcgagagagatcctgccggccttggtggtgcgatgtacagagtatcgttcgtgcttttcattctctttttctctctgccctggctatttgtttttattgatcgattcgtacggcgtttatcttaacgcactctatgcgtccaatcctcttctttctcaacagtcgaaatctgggcacctagagaggaaggaatctttcggattagtggtcgaagtactcatagtcagtttctttctcttcttgccaatggacagggcaaggaacatgctagttctgactgactattttacgtgtcccttgaattcactctatattggactggttgttttgattttctagtccaaaagttgcgcgcccagtttgacataggggctgatattgatctgaaattatctgatcctggggagctagaccctcatgcggtcgctggtgtcttcaaagcgtacctacgagagcgttcgttcaagaaattctcttctttcttcactatcctttgctgagatgaagtttgctgatggaatggccatcttgttcttgatggaacgacttaacacagttcctgacccgatccttacgtctgaattgacacccgggttcgatcacactatgcgtcagtacactggttcgaccgccagagacggagcgttcggagcttcggctacttcaccgaatctgaccggatccgagttgacgagcgatcgatcgaaagcgagcttggtgaccgagatccagacaaagctcggacgattgccagagaccagttggtacttgctccaggcggttgtcggcctgttggaccacactgttcgtctcttccttcctttctctctcgatatgggacaggtggggttgtgttgaccaagagaacgttcgttgaatctatcaatccatttcatctacaggctcgttacgaggaagtcaacaagatgacgctgtcgaatttgttgcttgtattctgcccctctctgtgtttttcgcctccatttctacggttactcgtcgagaactattctgtcctgtttgtgactccacccttaccttcaactgtctcgtccaagccgacacttcctcctcgacctcttggcccgagtcaacacaccaggtcttcctcttcctgtcttgaccaaacagcacctctcctcgaattatcttctccgtgccccgagttgttttctggactgagccgacgaccgtcgagggatgctcttaaggaggcgaacgatatgtggattggtgatctggggaaaccattgcctcctcaaccggttggtcggcttgatttgccgaccgacaggaatgttgaccggaacgccactgggctgtcaaccgggctgggccgacctgtcctcaaggtcaagacgacagaggaggagcagaagggggaggaaaggcagaatgaagagaacaagaaccgagggattcaacacggatcggccaagttggcagagccctctcggcaaaagccggtgtcctgctctaaacgcttacccgtcgctcggtccgtttcaggagaaagagagggctatccgacagagcgaaacgtggctgaccatgtcaccgttcctggtatcgccgccgctgccaccacctcctcttcgacaacgtccacggctgagaagacagttcttacgggtgtggtcgcctctagacggtatctgttctctactccgatagccgaccgattcaagtcgaccacggttcctcatctggcaccgctacgacctgttcataatcgaacaatgacgatgtctgatctacctgtgccgacacccgatgggggggtgatctcatctgcgtctgtctctgcctctgccttgtcgtcttcgctatccgggccactggtcaggtcggcggattcgtctagctcgttgaacagacagctccgtcggggtgcgaatggggggattggcggtggattcttctcgtctaggggtgcgtccggttcatcggcctcggcgtctctcctggcgggcagcaggtttggggaaagccgggtggatcccgataacggcggtcaaccggcggcggctaggaaaaagacaccgatgtggaagcgaagcagtgtggccgtcggatttgggagcggaggtgcgggtgggaccggcaatggcaacggcgatggcgacggactcgggtcggacgaacaagagtcgcgaaggtcggtcaaggaaacaattaaagctctggaagctcactctgatgagagagcctaaccgaacgtgtgtgtatatgtgtgtgttatgttcttgtctgataattaactagtagtactctctataccctttctctttccttccttcttcctttttggtctttaagctcttcagctcttcatctttcgtttgttctattggtttgaacgttgcctgtcctattccggatgtgaatcgtgtcagctcttgtataacccgtccgaccggataaactcctctcttctcccttttctttcctatccttctttccccttttggacttttttctccacttcaattcttcttcttctttccctccaaacacttatattgccaatatgtacatccattctgttccactccaccccgtcccgtcccattccgttcttgtttatccaggttgtcgttatcatctaatctcatcaccatcgggtgaaacaagaagtatacctttcggatcgtccggccctgacttccgagttcggcccgggccggtccaggcggactaaccatgagaaaacaacgggagttgacgacgatagcaacaacaccaaagaatagcttatggcgtacgtcttcttatgagcacatcgaagaaagaatagaagagaaaaccgaaagatgaacgtgcccatcgctatagagagtgtctatttcattggaccatccctgtgctcccagtgtggaacggtcattggccaactctgacgtaagaaaggcaaaaaaaacctggggaaaacttgcaagacaattggggcagagcgagaaagtagcctctcgttgatacaatgcccgtttccctctctctcatcggacagaatggatcatacacgagcgagtactaagaacgaaagagtcaccgtccacattgacacagcatgaccactagcatccatagtcgatcagctcggtagagaagcaagtgggagagcaagaaagatctcagcttcgaggggccccagtacgctgacgtgcgggcgaaaaaaaagggaggggggaggcaaacaaaaagggccgtcttttttttcttcccgctcttcttctccttcctatccatcactcacttccttactcactctttctttcccaactcttcccaccaagatcactactctatcaaacatgacttcttcccttgacgctcttaaggcttccggcaccgtcgtcgtctccgactctggagacttcgagtccattgctgtttaccagccccaggatgtgcgtctcactcattctgtttcctttccaatctttccatctcccttttttttcttttttttctttcgtcataagctgatctttgtgattctttattctcgtctcctcatccaggccaccaccaacccttccctcatccttgccgctacccaggatgccaagtacgccaagttgttcgagcccgctctcgagtacgctaagcagaagggagggtgagtatctttgcgttcaatggttcgccatgacaatcatcggagaagaaattcttttgggctttaaactcatcttgtgctttgtctcggctggtatcgttgtagatccgttgacgagcaggctggacacgccgttgaccgactcgtgagtatcattacattctacccggaacaccatcccgtgcaggacgtctatccagagtcttttagctccaccgttcaagaaagacaccagctgatcattctagcttccttctcccattatttatagcttgtcgagttcggaaagcagatccttgctctcatccccggtcgagtctccactgaggtcgacgcccgactctccttcgacactaaggctaccatcgctaaggttcgtctatctctttcttcttagctctattgatttatgtccgaaccccacctctaaaattcttgatcttgatttctcacagggtcgagagctcatcgctctttatgagtccatcggaatcaacaaggaccgagtgttgatcaagatcgcctccacctgggagggtatccaggccgcccgagtgctcgagcgagaccacggaatccattgcaacttgaccctcctcttcggtttcggtcaggccgtcgcctgtgccgaggctggtgccactttgatctctcctttcgtcggtcgaattctcgactggtacaagaagaccaccggcaagacctacgagggtgatgccgaccctggagttatctctgtcaagaagatcttcaactactacaagcagcacgactacaacaccatcgtcatgggtgcctccttccgaaacgtcggagagatcaaggctctcgctggtgttgactacctcaccatcgccccggcccttctcgaagagctcaagaactccaccgaggatgtccccaagaagctcgcttccgagaccgccaagaaggacgagccgattcccaaggtgtcgttcgtcgacaacgagcccgagttccgatgggctcttctccaggaccagatggccttcgacaagttgcacgagggtatcgtcaagttcgccgccgacggacaggagctcaccaacctcctccgagccaagcttgcttaaatttaactctaaatttaaaaagaaaaagaaacgctcgaccccccatatgtttttaactcacgtctcttcttttaatgatcctttcaagttttcccattttataccaccaactgtttctatatgacttttgagatacaattctgtccttcccacggtggcgaagagttgagagtgctgacgataacaagagaaagagcaaaggagaaagaagagcttggtggataagtctttcaaaggagaatatgtgtacatgtatatgtcaagataaattagggtatcatctagtatctacccatcaaccataaaaactccttccctccatttgagaatctacctgtcctccgctcctactcgcccgctcgttcggttctcctcgtcatcctcttctcgtgagccactaccgagtttcccagaagaccctctcggcccgagcgagaactctccgataggaatggcagacagaaaagcgagcacgcccaacgaagcagtcaggatgaacgtctggcgaatggagaccgagtaggaagtaatcgctgcgtgacggaggtgaggtgagagagtgaggatgtatgatttagagtgaacgatggacgatatgatcttttgtgtgtagatagtgtgggaagggaatcgatcaaataatcaaaggagaaaaaaaagaagaaaaagaaggaggaggagttatcagataagattaaaatataaaagaaaaggtcgatgagcgaaggaaacacggaagcaaggaaacaagaaaaattcacctgctcgcttccttcacaagtgatccttctggtcaactctttacccaagacagcctgctggaaggccgaacagatcgcaattcctagagtcatacccagtgttctgaacaggtaagatatcgacgtcgctttggggatttgcgaccggggaactaggaagataggacaggccaaaaattaggttgggcgaacaggcaagatcatacaaaagacaggtttgtaataagacgtaagtgaaggacggacctgaagagatgatagctatcaacgaagtcaccaagaacgaagagtatctgtttttagttcagcaaaacacaaagagcaggatcttcagtctcgacttgtaagatagacatatgacacagacaaaagcaagacgagggaaccagaaacgaacccaagaccggcagggacgagatctccccactcgtgccaactgtttgtaccttccgtatcccatctagacatcatcaccgagctccatatcggcagcgtcaagctgactacacccagaattctatatttcccagagaccttgatgatgtgcccgcttagaagactgccaatcgagagactgatcgagtttggcaagaggtgcattccggctgacgttgaggtagatgatcggacgattgtgtagtacagaggaacaaagaacaacacggatgcactggccatcgacctaaatgcatggagaaaacatggaagagaacggattacggattagtacatggatatcagtcagataccaagacggaatgtgaggacgtacatcaagaatgcagagatggatgtccacaagacgtttcgccgacgcatcacttttctcggaatcagcacttttccaccgttcctttccctttctccttctaccacgatgaacgtgacggtccctgcaacgcaaaacaccaacaacccgaagacttgaatgcttccccaagcgagaccggacgagtggaatgaaaaggccagcaggagggaggcaatggtaaagaataagatgagcgtcccgggaagatcgagcgaatcgaggagagatctgtgggtcatttcggctttcatagagtgagtgtcttgtcgaggcacaagtagagtaagtgccgcaagagagactacaaggaggggcagttgaaggagaaatgcgattcgctagaggtaaagagacagatgagttcgcaatcagagaaatccgtttatcacccttctcgttttggctttgaagacgaatgagtagacttacccatccgaatcgatcgctgacccaaccggcgaaaggcccacccgatgcacctcctaacccgaagattaccactacggtcaaataagagagcagtggcaactatgaatataacttgtaaatactatcaaacgtgtggaccgatgatactaactcatcaggccctgatagaaacctctttctctcatagtcgtcagatcggtggtgatcaagctgctcaaagtcaaaatgcctgctcctccagctcccatgatggctcttcctatgagaaggacattcatcgaggtcgcgaacgcgcagacaatggtgccaatgactgtttgaatttttgtcaaatagaacgcatctagcttgaatgtcctgatcatgcgaacgaaaagatttgagaaacgtaaggacgtacagaacaagacacctgccaagagaatagtgtgagttctggagaaatgatccgttaagcctatatagatagattggaggtatcgtattgttggaaagaagtgaaaggacaatatcagtatccagatcattcacaggataatttgggtattaaaaaaacctcttctctacctccaaacacgggtgttgccactgtcgagatcagagaaaatatggatccctataagattggcaaactcatacaaagacggttgtcaattgatgcaacatcacgaggccgagatacaacgactgacaatatatgccgatagttcaatatgattgaaatggccagcaatggtcggtgacagtgtggccaccgctgtggccgataccgcaaacgttaggtttgtaccccaaacggatagtctgccgaccaaacaggaacatcaataacagtttctgcaggtacaccacttgaataccccgggtctatcggagctgactaacaaggttatccccaacctccagccttttaaacgctcctgttcttcttgttcgccggtttgatctccgttctggattggtttcgtgttcgaatcggtctgcttgatagtgacatcacttctttcgacagcaccttccgtttcctcagtggctatctctactccttgtatcgcaccccaggaggaaggagagttggctgcactgagaagagcgtcgcgttcattgtgtagatgtttggttggaccttgtgaaggcctatcagatacagacttggctgaaggcattagctatttacaaacagaaagaaaaccccgatcaatgcaagcggggttagtgatagagaagaagaacaaataaaagaacgatgaatcagcaaaatgttcttgcttcttaaaaagaaatatacctggccgatcggatgggtctgtttcggagctagcctatctatacaaatcaagaccccagacggaaccccagatatgcccacaagatctcccagcgcgcattctcacttgggcacatctcatccagctaatcaatctggcaagcacctttatcttggtgtccacatgtattatgtctctgggttgtcctctggcgtttgggttaaggcttcctttgatggggtttcttctggaagaagactcattgaaagatgtttacattctgtgttgcaccctgcatctcgatcggaatttcaatggacgccattgctatacaccaggtagtattggcgtttgttttttcgacgtagatgcatcaaattagaaggcactctcagccttctttccgccgctttctttcttcttcacccccatttccatcttcgacgtcaaccgatccgtcctcaccttctcctctcttccgcttctctccaaccccgacggttcgtccatcagcgtcgttcgagactttcttcagtacccatctcacaagtccgaaaccccaacctccgatctttttctgaattgatatccgctcttcttcggttccaataatgattccttcctcggcctctctcctctctttacgggcgtcactgtgtccgttgttgtcggcatgttcatcggtggcagccggcacgtgcgttgtaggctcatccggcttggcttgttgtttgttttcaaagatcatccgaggagtgatcaatggtggtcctgagcccgggacaacagaaacgcgtatagaggcgggtaccgagtcggaaggagtttgtgatggagaagacgcgaatgagggttgagaaatatcgagttcgatcgaaggtgcatcgaaagaagatctcaaatgtactatcactgatatcatacagatccaaggagaaccaagaagaaaggtttcagacggtaaacatacacaaggaaaacgagctaagacataagaggtttaccttgacttggagaaggatgattagaggattcaggcttgacgtcttcagaaacgatattggatggagccaagttagagtccgaagtgccagaggacgacggttggttgaagacacctagaaagaactcgttgatgtaactccattttctggcccactgttgttatttgattcatttcagaaagagaggaacagatgagatttttttctaatacatcggtgaaacacatcggagaaagacgcacctgtagaacctgaacaacatcttctttcgacttgacgccgacccgaccgacgatgatcccctcgagtctcttgtcttccgccagcgtccaccgttgactgggtccactctgagatgcagaagacttccagaaagtggtccgagtaccaggctcggttgttagcggagtagaaagtgaatgtgcttgttgaatctacagggaacgaaattgaaatagttgaggatggaaagtactgtttagagagacagaatcaagacacgcacgagaaggtctagccagcctgctcttgtttcacctccttcgatattcctctcaggcgctccaaccaccaatggtggatccaaaacgatttcccatccccacctcccttcatgttcctctttctccttctcctttccctcttctccttttccttcgtcaatcctgtcacgcaaccaatgaggaggtaaggctcgagcaggcgcaatcttgttgatcggtggagaaggaactagatgcatcctttgatggtgcgctggagtgtgtgggaagaagaatggttcagatggatgaatagcgaatgttggatatgaatgatgagttgataaaggtgtcgatgcagagatttcactgaaactagataacacttcttgtcagatcctcaggcttcgtgattgctctcatgagaaaataaatggaagataccgacgtttctgtccatatgccccgctccttaagtatggcctcgatctcattccgtatgacttctccatcctcgtatacgttacctatgactgcgccttcttttccttctctagcttgttcatcatgttccaaaacctgctccatctttacaacttccaacatccgtctttcgaactcttggagcactcgagcggtcttgagcgctggagactcatcgggagaacagcctagcaagaggtgaagatccggcgaaacactcgacgggttgattaaagagtttgtcaagatttctagaggagcacgtagaaacgtgtcgatagatggacatggaatgggttcaggagatgaatggagcgcgatagatgttttgaatttagtgatgctgaaggaatggtttggtcttgctagagcaataggtggggattgcgaacttagtgcatcaatgttggtagttgttaatggagacccgaccaagtagatgtcctctatttctccgtcgggctttgtaactatctggttgggcgcagatcgttccatctctacctcgacgacgaggaacttgccgccgacgactaaaacctctctctcaacggttttctctgaaatcccttccattgtctccctaaagacttcgagtccgagggattttgatgtagattccaataggtcaggtaagctcgcggtcggcgaaaacgcaaaaggcgttttggcagggcgggggaataacgtattcgaaggtgattgagaggaagaagggaaagatgacagtatggctaacgttggcgtcagcttctggagtagcgcagtggatgatgacctatgttaatgtgtcaaggatggacagatacgaatgagttaacctcgagcctaaccagacccagaaggtatgaaacgaaatagacaaaccaatctttcatcaagccagcggcccggacccttccttcctctccgccttcttcccaaatggatttgaattgctccagaacatttctgatgcctcctacagcttgctggaagccctctctcgtgagtgggacgttggctgctaatgtcagatccggagggagcgaagcgtaagggttgatggatgaaggatgtgagcctggcgggtagtaggcagagagagaagatgccagagagttcaaatgggacagtacagatggcgatactgttggtgtgacgtccatactgacttctgcagtccagatggattcaatatagagcaaactgatgatggttggtcggtcaatggattgattgactgagagtgagggcgagtgtgtacacgagaggaagcgagcgaaaccccttagacagacgatccagatgaatgatagatgaattaattgcccggagacagccgtcgaaatttggatttttttacctgccgttgttttcgagagcaaacgtttcgaactctttcctctccttcttttctttcttccttacccaacacgtattctgttgattcatataaacacaatgtctggacttactcacccctctattcacggtaggtctaggtctttggcatcatcatcattctcttatgccgagtgatgtgctttgctttgcttctacctcggtttcagctaggatccgagcatgaaaattgatcctcttttctgtgcttctttctttccttttttttcttctttgcagacggatggttccgagagatctctgatcagtggcctggtaagtcgggttgttactataatcgtactatctcaacctaactaaatgaaatctgcgcttgcctatcgatctgtgtttaggccaggctatgtccctcaagtgagtgttctttctctcgtgctatgttcacaatcaagaccggtcttctcaacgcctcttgcttgtctttttgaatctttacagggtcaaggagatccttcacactgagaagtccctcttccaggacgtccttgtcttctcttcggagacctacggaaacgtcctcgtcctcgacggtgttatccaggccaccgagcgagacgagttctcgttcgttctcttctttcttttctattagagttgaatgtctgcaaacagaagactcatgcaatgatgactgaacatccgaaacgatagctaccaggagatgattacccacattcccatggcttcccaccctaaccctaagaccgtccttgttgtcggaggaggtgatggaggagtcgtccgagaggtcctcaagcacgagtccgtcgagtctgttgtgttggttgacattgatgaggttcgttgagtttctgaagaaaacatctttatcagacatcaagagattgaaactcaagtgttgttatccaccggtttggttcttccatcatcgctgttggtcttgtcacctatcaggccgtcccccgagtctccaagaagtacctccccggtatggctgacattctttcccaccccaaggtgaccgtgctcatcgccgatggtttcaagtaccttcctaccgtcgagaacaccttcgatgttatcatcaccgactcttccgatcccgtcggacctgccgcctccttgttcgaggccccttacttcaccttgatgaagaaggctcttaaggagggcggttccctctccacccagggagagtgcctttggttgcacttgcctttgatcaaggacctcaggaccatgaccaagaacttgttccccgttgccgagtacgctttcactaccattcccacttgtatgtgcttcttttctgtgccgctcttgtcttcttctcattcaataggaacacacttgactgaccgcctatccgacatggatccttctgttcgtgttcatccaacagacccctctggacagatcggtttcgtcgtctgctccctcgccgctgaccgaaaggtttccgagcccgtccgacaggtccctggatgcaagtactacaacaacaacgttcaccgagctgctttcgtgcttcccgagttcggtcgagctatggttgaggagggtaagaacttgttgaacgagttcggaggtgtcaacaccgcccgactcaacaactagagaatattcccaaatgaaatctgacttttaaagtcgtaaaagaaaagaaagaaaaagaaaaggaaaagggctcgactggaagctgtccatcaagatacatgcacgttcaaagattttttactttttgagtcgtggaggcacataaatcttgtctgtaccgagcctctttatatatcggcagtggtcggacgtacacgacgacttcagccaaagcatctagtggtacagagcgtctacacatacacatccaacgagatcaaatacaactgtttcgaatattttgaacaaaacgacggtctcgttgtcgcgttttgtctggtttttatgcttggcattcgtcttttacggttcatgcataagcttcaagcatgtctcgtatgtactagaaggtcaaatagatgagggaatggtaagttgagtgactcggccatcgttagactatatattcatcaagcctggacttacaagaatgagactcccatcgaaggggctaccttcagcaagtttggccaaataccccggtaaagacccctgataccttctaaatatccctccgcgaaaaaaaaaggaaaagaaaagaaagaggaaaaagagagaaaacagaaacaatcacgtcgatcagccttgacttacggatgcacatacagacggctgcagtaacttgtaacgaaccatgtttgaagatctgaatcatagctcctgtgcctgatgaatatgtatatgcgtgcttggcggccggtctcaatgaatcaagtttgggtactgatgtggatactgatgatattggggttgatattgatgttgacgatggtgttgaggaggccatagcgaaggaagaggagaaagagggagagggggagacggatggtgccagcgcggcccgacgagattgctccaatccaatgacctgatgaattgacatcaaaggaaacacaagacggacatcaacatcaagtctctcttagcaaacatatgtgtgagatgctgcgaccaggaaggatttgtacgctacaaaacgcacctgcatctttcgcctcagtaaatcaaatggaaatgtcacggtctggctcaacccaccagcggccgctccacaagctagcttgatgagtgcaactttaccgccgtttgtcgaatcttcctcactcttcggtagccaatacagtcggaatttctcataaactatttggaaatggaacgaacgaaagattaaattagtgtctattgtctgttgaaaggaccgtttcctcacaagcgcactggggtgtgaggagaagggactcacggacgaagttcagagccacataaggctacaaatcagaggaagaacagaacagaacagaagctcggtcagtcaacaagagctggcacacttcaatatgaacagccaacgagctttcgatagagctacgagaagacaattctactcacagccacacctctgttgaaaataagcgaggataagacaaatttttgattcgatcaatactcaacccttgttttgaattcttcatgtcggaagcaaaagagtatttgatgaaagtcaagggacctacgctgcagtcgctagacaacctctatacaaccctcgaacacctccttcttctctatacactttcctggtcatgctcatgattcctagctctttcccacctaaatttccgtgtcccatgccattcgtccgtctatcagttgtcgctcacaatacaagtagagctgagaaaaaaggatgatacgaacggagcttggccgcttccagatcagatccatgaagttgagcagcggagatggaaagtctcgctcgtacaagatcgagcggaaatgtcaaggcaacctaaatacggaaccctcaaaattcaacacctgatgatacaccgtaactcatggctgaaaagagagaaaggaaagatacagaaacgtacagaagcaattccagccaaacttccggcgaacaacttcattcctgtcccgagctgtccttgatcagaaccgtcgacgtcggtcgcgagaaggactttcagtgtttcgtaagttgaaaactgaacggcgctgtaggctgatgcgatgaatttcgtttagagtcaggagttgagaagaaggagagggtagatgatgctcagcgcaaacaatcttactgcgaacaaaggaaggggtagtagagacgaacgcataattcgaagacagttgatcccgtttcctttcatgtatcctctgaatccctctctgttgcacgaacggaatcaatagaggataagtcaaaaaagtcagatctagcccgctttgcttgcttcttcattacttgactagagagaaacataatgggcccaatacgtactcgcgatacatctttactagggatgcaaatacacccttgtaaggttgaccggtatgtgccgattgaacctgcctataccgtccggagacagcaaacatattgcgcgtagcaagaaaaagaagacatcttcagaccacgtcgagctaagacgaacccaaccggatttgaaactatcttccaagaggaaatatagaacgtgaaaggaaggaatacagacatgatgatcttaagtctttctaaaggagagacaaccgtcctagatgtcgcacccgccaggccacccgcaataaagtactccattagatgctgttcaaccggtttcgttcgagcagaaaccaacatcaagatgttcccaaatcgaaagagggcgtaagccaaagagactcgatgaaatagcattcatttctacaactctaggttctattcgttacatagttgaaagcaagagatcccttttgctttctctctgctctcacacggacgcatgcatgagttcggaattaagcatacctgtttattcaaaagtaagttttgccagttagagtcgttctcgactggttcgtccaagtcaattatttcaagttcagctgggtcgtctattggtgtcagactggtgtcaacgactgggtaacggtcggaagagtatcgatgttcggggagattgctgttattatattctgatgacgaaggagaagacgaggacgaggacgagaaaaaggacaccatgatcaaggaagtccctccctatttgggccgagaacgaggagaagaggggtgagagatgtttaatgaaagatctctccgttgtctggtctgcagatgagaacggacggagaacgaaaagaaatcgggtttatgcggtatgtatctccacaggtttcttcgcgcccttccggttccgaccgaacgctccggtttggttctctccagccgagccaagcacaagatcacaaggactgctctctctgtccgccaaatgaatgttttgactccgtaagtgatcaatcaggaagagataaagattgtacatggatgcatgaaaaagtgaagatagaaagatatgtaaaaaaagaacgtgcagacgaccagtgaatatttggtcgagatcggaatgagagacagtaacgtgcaggaagagagtaagagaaagagagatacttttcgtcaagactggtggaagaattcggaagcgatacgagacgaggcaatcagagaccaagagagagtaagaaaagttcatgagaaggaaaaaaaaacaggagaggtgtgtccttagagaaaaatagagatgattgaagaaacatgtaaagcaatgggatgtgttctaaaccagagagatggagatgagacatgggtatttaagagaggaaatagaagatgaaaggaaaagtggaacgagacactactctacgaatccatgagtgcttgttcgataaattggttaatggcctctttacgagacgatagttcaacgccatattcgctctctgcaatacgtcgtcagagaaggtaagaactggttagggtatgacccaaaaaagatactttaaagagggtgatcactaacccaagtcctttcgtacacccttcttagtgaccaagttgaggtccgaattggccaggattcgtctcaccgaaacattcaagtcgtgatccgacggaccgtccacatggtctgatgggtccagcaactgcagttgagatgagcctggctggtaattggctcctccaccgggttgtaatccattatcattgaagtactctccatattgggtcccacgaacacttcggccgtccgtcggttgttggccgtagaacgagtttacaggtggtcggtagctgtgttgaaggccagatggttgcaacgaaggcgtgtaatgtcctccgccggctacacttgccggtctactgccatacattccttcaggactgtagtcttggtaccgatcgtaggaggattcatggcgagagacaggggcatcgtaaacggtttctcgaccatagagagagccagcttccgttccaatcgctcgcttcgaaggggggacccaagagccgacagacttgttgctctccctctcccacagttcgttctcgtattcgttccaggtcttgagtgggatagacttcgggtcgaaatgtccttcatcatgaatgaccagcttctttcctttctctccgacgaccacacgagtagaaccccaagagaagtcatccatgtaccagaaagaccagatcggaagggcgaaggagaagatgggaacagccagaatgtagaacaccatccaaccgatcatgtcccactttcctcgaagaaggaagattgctgcttgaagaccatagatagctgcaagcatgatgatggacagggtaggaatcgtttggccgtctccgatgaccaagtagagaaggtacacaatctaggaaaccccacaggcgatcaatcagtcaacgctgtcctcgacagtgcaaaatatgatcgaaagaaataaaaaagagaatacttacataagccacagtgactggagcggtgatggtagaaaccaagtcaacaaagacaacgaatcgcatggagaaacaacagaaaccgcaaagcttgtcgatgaacactaattcggccaagttgtggatggtagagttgatccatcgacgacgttgtgagatcaagaccttccactcatcaggagctacagtctgagcgtgagccggtcgaacaaaggtggttttgtaggtagggaaataggttagaagaagggtagtgaggtatcgatcctctcccaaatgcaatagatttttaaggctaattcaaatgaaccatcaagttcagcaaacaaactcaaccttttgaagagcatgtccatgagagaaagcttactgcagagtgtcaactcggttctcagagtacccactgattacttcatccgcgatgaagagtggcttgtgagagtcgggtgttctcagtcggtatatactgaaacaaccaggaagacaagtgaccgatccgaagagactttcgaacgatttggccaagtgatgagagataaagtattcgtagacctatgagaattaacgattgtgtgccttaggatcaatagaggtgtcaatgtacaggacgatgagaaatacaactgacctgcatcattgtgattaatgactgcttcgcgttggcaatagatgtctctccacagcaagcaataactttcttgtcattgaccatcctgttgtgttcatattaagcgacgcctgtcagtttattgcatctgacattcgtcggtgaccgaacagcggaacactcacgaggcaacaaggtaacttagagaatcttcatggacagtagtatcagcatcgaccgtgaagatatattcgtagaaactggggttgacaccaatgacgttcttgatctggtggtacatctcgagctccatgggattcatcggagtattatagtgaacctgatagattagataaaattaaacaacacataaacatggtttcagaaggtgaacttctctcgagatggaccgcgcagctaggagagataacttctattgaaaacaaaccttgttgaggaaatgcatgacagtcatctgagagtctcgctttcctctgttgcccggtcggtggccctctcctggtcgaccacacttgacgataacgatataggggaccacatgcccagcgcactcgtacaaacccgagtagatctttcccatattgtgctgcttctgtccttccccaagggacaggaaactcaagctctccggggtaagattcgggtcaacaccgagaatatccaagacaattcgaggagtacttcggtcattaccggctccaacaatgttaccgtcgcaaatgacggtgatgagctttcgcttgtcgtcgtacttgagctttgcgagagaatcaatagtctttttgagcgaagactcgccctccgtataacaaggcacctggcagatgataaatttgtcttgagattcggggagtcgagtcgatccaaagtaaagggctccgaggaacttgaaaccaatgatggataccatgaagattgagagtgcgagaagaatatattcagcaaacttacactgagcggattgacggttgtctaccaacccagtcaggaacctagaaacaaaagcatctgatcaattaccggccatgttatcttgtccgcaaagattaatgatgctcacaaatttctcaagcatgtaagctgacgatccaggacgtcttggccaattgtggaggcaagggcattcagactctttgtgatatcagtaccagatttctgctggaagagagagatgattttcggtgacatgaactgtgtgctcgaattagctggaacctgagtacccgaaggagttttgaagtagggcggggacttgacgtattctgagacatcatacacatggttgtcatagatagctatagcggctccactggttgctgacgacctgatcgttgaaggcaagatgccgacgaagccttttcggaaattgtatcgcatgtagaccatttgttcgtaataccaatccggtcgagaatcgttggtgaaagctcggaagtcatggtagccggaattcgtgtcttgggaactcgaactgttgagagagttaatctgaacccaaggactgacatatccatcaatcccgttgcacaaagcgctgacctgaagaatacaaaacaacaacgtcagaatttgcccatcaggtggatgagactcatattggaaagaatactaacctgaacagggaagagagaggttgcatcaatccctccgtattgaagaacagatttcgaagtgacgacagggacgatagtgagatgggtcttagcgataccagtaagctgaatgggttgaaccatgtcaatcatagcaaccaaaaatataacagaatgagaatctcaaaggataagaaagaccagatgagacaaatgacgtacatcaaagatctctcctcgaatggagacaagttcgttacttgggtcgttgtcatatgagtattgggaaagctctcccgtactgtagatatactcctttggacagatcaggtttcccaagatcgcaatcacaaagaccgcacaacccatgatgaaccagatgatgacattgatcgccaacttctctctccatgcctgtctaacatctggtcgtttaaacttcttccgggctgcaagcaagaaacttggacaccaccaggtgagcagccaaacaagggcgacccatttccgacgagcagaagaggtaccgatgacctcagtggtttcccctgcaccggccatcttcggatccatattggcctggtcgtgcaacccagttttttccatattgccaaacatgttcttggaaggggcgtatgcttccgttcccacgttggatgcgttgtcatcatactgactgttaaaacggctgggtgcataatcgtcgtaactcctcatcgtcttggaatcgtaatccatgtcaggttcatccctctgggcattggcgaccaggggtaaagcctgagaagaataattctcagcgaagttactcgtgctacctcccaggaaaggagactgcacgggtgaagagttatagaaagtgttccggtatggagaaaaggggtcttcagtaactccaccgggtaccaaacttcgactgtcggtctcgagctcttgattttgacgcttctcctcgacgtcatgaactcgaagttcgtcctccaagaggcggaatattcgaggactgacaaagatctgtcaaaggagtaaaccgagttcgcaagtccatttcgaacacatcagcagcaaacccgatactcaacagaatcgaacaaaagatgaacggacaaaccttgtactttcctacggccagatccttctctcgccactccttcctctcacgcaaactaatgactgcgtctgtagcagagtcatacccaggaattaattcctgctcgtaccgctcgcagaactctgcgtgggtcatgctgacctcaaaagagaccgatgctctcttcgcgaactctgtcaatcctacacttctcacttgagcttttaggcctctcgactcgagctggtttggtagttgaacatcgttcggggtcaaggcatatacgatccaagactttgtctcgtcgaacgtttcaaacaatacgtcgagcgtcgctttgaattccccgacaacagatcgaatttgcggagcagactgttcaccagtcttttcatcctgcacaccatcgtcatcccctgcccctaatcgggcaccgagccgacctccttttcgccgagttgagggagccctcataggcttgacgggctgttgagcggcaacgatcacctcttgatctcttgggtggacctgggtggcaatagcgttcgaagcaaacaagcctcggatgaaagtatttgaggagccagactcatcgatatcggcatcggtacttcctcttaggagcgagacgaagtccgggttgatcgcatcagcatttttctcaaggaacgactcggcagagtatgtggtcggtccattatagtggctgacgataaaagtaggaaatccggttcgatcctgtcctccagatgagaaacttgggtggttgttccatcgtttgcccattgcttcgaccatagtgtgatccgtcttcttgcccattttcttagtctggtcatccatgatgtggatcaagcctccaggtgttgtcgagagcattcggacgcattctgagttgtcgaagtactggactgaaggaatgagagaagagattccctcaacagcgtactcggcggtctgtcgctcgaacgtggattgcaagatccagttttgaagtcgctcgttcgaaaagttgacacagaactgatccaacgagttcaaccgtgctccgaagcctgagaggttttggaaaccgggtaagtcgaggatgccgataaagttggcaaaatcgtctcggcaaaggcgctcgttgatgtgttcgttgagccaagcaaagagcaaggaatagagggactttgcaaagtcgtctcggttggcagaagctccttcggcatcgaggaacacggtaactacgtctcgctggaccatcgcggtcttacagttgaagacctcttccagcgcagaagctctgactccaagaaactcggagacagtttctaaaacgtcccagtttcttactatagcagcgtctgggttcttatcgtggtctatgtagaactcgaggtttccaacatgcagaatggcagcgactaactggcagacctgggcaaccaaccgtttcgacatgccgaccagcttgaaggcctgcttcaac

SEQ ID NO: 3071 - DNA, 9451 bp, Xanthophyllomyces dendrorhous
tcaactgctcgaaccgggtccgatcatcgttggcttcgcctcccttgagctgaacgccgaccgaaccacgagcacctagtagacggtaagcagaagcatcgggtgctagccgaaggtgttgacgttcctcgggtgtggcgccggcgatgagatagtagaagacatggaagttgcgttctccaggagaaggtccggccactcggctccgttcgaggtagtagtccaaagtctttgcgccgcacagtcgaccgcggtctgagaactgcagctcggtgtacttcccaaagcgagacgcattggcgttatgaagagttctggcgtttccgaaagattcaagaacgaactgatgacagtgttcgcaagttgttagttaccaaacctgaatgattcaaagtgccagagtgcatggcaaggaccaacctctgcatttgggatttgctgcattagctttgcccccttctttccagggccggtgaccgagaggtcaataaatgatcggatgagaagccttcggagttccgacttgccacttccagtctcgccactgaaggagaaatatcacacaacggttttttccataaacaagatgtcgatacacgtgtgatgaacatgtcaagggaaaacatgatagcctacctcatcaaaatactctggtctcggccagtccttctcatgtcaaaataggcctttccagcaaggccaaagatatgaggaggtaagatgtcccgcatttcctgcgtgttccgataatccttgctgtaggacgctagtgtttggtccgaattggcattgatgaatttgtgagggttgattgccaccaaggcagaaggcccgagggaagtgtatataagatcaagtaggtatcgatcacgaaggcaggcctgtttgatggataatgatgttacacaagatatgaagtcagttattgtgatttgataccttcactgtcttgtcaaggcgaacgaccagaaatgtatcgtagtcaaaggacttggttttttcttctttgtctcgagctgtctgctaagtgccaggtatagatactgagatgctaggtacggttgctgttcactcaccacgatcgattcttccgagatcgagacgagctctgtgagatcgtctgtttgttcgtgtctccttgtgggccctctgctaggcacgacttgttgacgggcggccatgtttgaagatatcagtcttcgttaagaagatgtgcgggagattgcaaagggggtgaaaagaggtgcgagctagaacgagaacaaggtatcagggttcgagcgatgagataaacgctaaggacgttgtcgagaggaatcggacggcttgcgagaatcttcagtgtttgccgatcaatgcaagtgagaggtaagatggtaatagagagaaaagaagaagctaggagagtgacctgaaaagtccaaagagtcgacaaaggggaaagtgagagtgaagaaagccccgttggcaggggtggtcgagcgggcgatcgtccttttaaaaacagtggtgaaccagagttctgtgtgaaagagacagagaaacaaacagataccaagggaacagttcagtttggaggttcctactgataggatcaaagatgttccaactcacattcaccttgtggagaaggcaacgaaagggaaaagacaggcctgggcgagcttgcaaacgaaggaacacacaaagaatacacctacatacacactggtgttttgatgcacgttgtattaggtaattgtaaccctaacaaatgataccgagccttggtcagtcatctggtagtcaccattgtaggagacctacgtcgttgaggggaaaagaaataaagacattctataggtgactattgagtatgacggcctgacgatgtttcgagtagtcttgttgaaaaattcaacctcgttcatagtagagttcatcgtggagtcggactaagtcgatggagagtagttcaagatatatttccttctctagagcgcatatagaaagaacaagaagagggcttgcaaatatctctccttacccctttactaaatgagaagaaatactcggggatatggatatgcagctggttagcccaacttatttaccagctattatcttgacagcgccgataggtatagagatcgactataccagatattctcaatagacttttaattctttcggagaagttcaggcagctaactctgctgcagaatcgagaatcgctctttccgcatcaagtaagaccagatgttcgatgcatgttcccacgggcacaacattttattctgtatgtctttcgattcacattgatgtttgtgtctttcgtccgtctcaattctatcagaactgcaagcgcagaggattctgctaacttgaacataactgacaagacagcggtatcgaatatgccagcagtagctatcacattcagcgcaacgatggctggaatgatgatcctcggttaagagttctgctatcatttccttgtttcctttttcttccttctttccatctttatctcgtttcctctcttgcccccatcatcggcgatgttcgtttcagagttatatgtacaccctacctcccactcacatctgtcgctcagctatgagcatgatcatatactatctttcgattcactctttgcctttttcagtgattgaatcgttaagaaggaaacaattcagaatatactccaagtttccaccaaatccgctgatccaagcgcaagtgttctcaagattcaagaataatctttcggaaattgacatgtgggctcctatatctacttgtagattaaaaaaagattcgaaagctctctctctataatcgaccatgttggcatacacagataacgatgccaaggaactccgatgagttcaagcatggaacctgcccaggcgatatagatcgggaatttgacttccttgcttagtatcgaaccgttccagtcgacgtgcttgctcagagagatggtcggaggacaacgaaggaaacacctgtagaaagcagacatacaacccatacgccatctcagaggaaggaaaaatcaagaatacgtcctttgtaggattgacgcgcacctgataaactcgagtcccaattccgatctgcatcaaagttggatggcattcagccaaggtatgtagatctcttatacttggttcccagccatattcatccggcggaggtgccaagatttgcaatgctctcaaacgtttcattcgtcccatacaaatacctaatctgttgagatctttcggggtccgtatgcgtaggaacaattgttcaagattaggagatgaatgctgttcaaaagactcccacaaaaccttcgacgagagtgacaagagagagagatttgggaacaatacgtttggtagagcgaacgagatgggcgatcggcctgtaggggatgttagatgaagtgtctcaagggtgttgtgaaatgcaataaggatatcgtctaggcaaacggcatgaccacttgggtaggtataagaaagatatttgaggctgggtgccagtgctgggaggtcaagagtgagaatgtcgacattctcgacagattcaagcccgagatgtgtgattgatcccgaggtagagcggagaatagatcggacgccctcagagctgattcttatgcaagcggtcaggctaagctcgttcaggttggataaatatggcgcccatgatttcagatgatggtctcttatcagaggtgatgactaggtacaaatagaggtcgttcaataagtatcagtagtatgaaacagaggacaagatgcatggaccaaagagagaaacaactctactttgcagatgatcgacaacctcttcagcccaagttttgtcttcctttctgcatcctgattctggtccaatactctgaaccactctttcaacacatcgaccatccccttatccggcatgatcaatcctaacttttccagcctggaaactctaagccaacaagtcgggtcatacacatctaaagtagacccgttgatctctagatctctcagaaaaggcatcgaggttgagatggcgagaattagtccttcggagagcgacctatgcctggtccacgcgagtgatgacagattgggaagggacaggaaagataggagtgtgtgagaagtgattatgtccgaccgatcgattcctggaagtggatacgaacgaatctcttcataagatatgcacatacgccacatagagtcagtctgtcgactcttgagactcctaaaggattatgatgagaatgaagtcacctagccgcttcacgagctgtccgagctccgagctctgagctaacgtccggaagagcaaagggagctgacaaacctcatcagagaggcatcagtgaaagcggtcaccttgtcagactcactctcttctctagtatgtagatgatttagattatgaaggaaaccacacccttgcatctggctctctctcccatggtctaacccagacatgtgaatagagcacctcattcgcatatttcctccacgacctggaaacgagcgatagtacccgaaggtcatttggcgctgtcgtataggatacaatcagtgggtagagctcttctggaaagttggctgacatgtcgatggtatcaatagcggctgatgatgaagatgaaggttttgagtcagtgttaacagggatttgaaactgaatgatctccgactcggtctaagccgaagttgccgtcatcgagcagttataactgggttttcaatatctcaacactcaacattcgtgacatcaatctttccgttgacgaagacgagaaagagaactatataaagtacaacatatataacatctagatatcaagaagagagtttcccaagaagaacatttgattccctatagagtcctgaaactggccgcagctctatcatcgctgagcgctcgattatattctaacaacaacaatagcagctatgacgaacgaatcctgatatcagtcatgattgcttcccagattgatatgaaaggaacatctgttgacaagaaagagaaaagaagagacaacatacatatgcttgcatatctttccaaccccacctcgagatcgcaaattctctgccgttatgggcaatctcctccgccaaatcgaattggccttctgaccccgagactccttcgaagaatgatgttatgtcactatatatgtaaacatgcgcatgcctccgaacatcagtggtaatgctagcgcgaactgtcaaggtgtaagatgaagacatacaagagatcagagtaggagacttgaacgggcacgtagtggtaccaggggatgatggtatcactgtttggaagcatcggcgcgttttcaccgatcgcaagattagccagcaattcaaatggcggactttgccaaggacaaatagaaatatcagaaggacactagactgacgagaaccattcgttgaagacggtactcttgaataccgcactgcccgaggtgagtaaccttcggaatcgggtggatgccccgtctccgtcgacatcgagttggtatctgaattttgacgctttgagcggttcgatcttgctcctaaagttgaacatgttcgacatctccgcacactgtatcacaagatcatccaaccacgaagagaagaagaacacaaagccgatgatgaagtataagcatatcagctatggggaatgtgaaaaagattaaatataaagcaaagaaaacgtgctgtgccgtctgcttcgacgcatcttgttggactgcctacaaaaccgagatccaaccaatcctccatgagctctctcttggtcttttctttgagcactcttccccctctgacgaccaaaacctcttccatctctccatcatcttcgtcttcgtcttcattgtctttggcctcagagtcctctttcggcctcccattttgttcgtcccctcctgactcatctccaacgtccttctttgctttctgacctccgaagaatacaagccgctctcgctgactctttctccaatcgacaaaaccatcatgccagatccctgtcgttgcccctcgccagatgactcgtttgtcggtctttttgaggaacgtcgtatggggtagcgtcgcattcaaacttgaaagcggaataccaagtaaggtaggtgagagcgcagcactgtagggtgagataacaggagtaaataacggcaagtttgacgaaggcggtggagggaggtagtgaccgtgaagttgaaagagtgaaggatgtgtacaaggcgatctggtctgggattcgtcatagatgaatgatctgagcgttggcgattcttcggcctgagtggtcttgcagagatctgaccagtgagtcttcttcgatgtttcaggttgaagcaccttgtcaagctcggattttttccatgtcttgcctgcccttcccaaagcctttgctttctccaagacgctctcggaaattgccagggtgggttgatcgagtaggttgaagtaaaggtcgaggtcgggcagtagatgggcgataggttgaagaagaagagagagtgaacttgaagttccaacaagaggaaatatatgaatggattagcatcgttacagcttcgttagataaagatggccgaaaactcacgaagacttcttctgatgttctttcacagagctgacttcctcggagatagcgccttttctgaagaacagattgagccatcccaagccatacgatataagttatatgctgactgatctcaaagctgaccagagaccaagacttaccgaatctggaatgtggagattccaagcatgcctttaagagccttcacattctctcttaacgtctttccttctacgctcaagaagggaagcacagaattataggctgtcgagtgtggccaaggcttgaggtcatactcgatgcaaaattcgaacctagagagcgcagagacagaggcggtaaagtcaagaacccgatctataagtcaaagctgttctgtcgtgcgacgacacatatgtgccctcactgaccaggcttcaaaccctttaggtggtaatgctcctccgttgagctcagaatacagttctatagctccggctagcgtcgtcggtatcttggactgctgaatctttgcctgctcttttgcctcctgaatggcaccaggcgcgttgtataggcagagcgcggagaagtcagtcatcgagaagatctatgccagcctctatgactctcaatcatgaataagacagtaacacatacagagatgagaacctctatcgggtggatcccgtcttttaaatctttgtcggccacgtataaaatgccattctctcgtttgtatgaagggatcgaaagagcatccagtgggcgtttctggaccggcttgacaacgataggggctgaagatgcggattctttggtagacacatcaagatggaggtgaggaatatgctgtgagggttcagttgtggaaggaaagagcaggaaatcagatctggtgtacagccggatcatcggataaacgttaaaaagagtctagagaacatgatcaagaaccgtacgagagcttcttctacttcttccagaaggatgtctgatcgttcgttatatggaaaccaagagaacgtcagataccagaccagaccaaccagatagcagaagagaaccgagaacactgaccagatcttctattgagaggaaggatgaggagctgtattgagtgtcaaacaaggatcatgattagcatcaaaacgagctttaccaggtcggcgggctcggcagagacgtaaggcttcgaactgaccaaaaagaaaagcataaagggcagcataagagttgcaaacctcctaggcagcctcggtctcaacagaagcatgtctacagtatgctcagaggcaagcgaagatggaaaaaaagaagaagaaaagaatacggtggatacgaaagcacccagaatcaacaacggggtagaaacactcgggtcgaacgttgtgaagaaaccaaggcaatagcgcgggtctttaattacgtaatcaaaatgcacgtgtcgcctaactggagtccggccggcctgggcctctatgacgacataggtgagttgcaactgatgatgcttactcttattattagcctggagctcgtccttttctctttggtcggacgaaagaacttacgaaagagaagcatacgaatacatccttcttctttctgattgactttatccaactctattctatcgtttactatcaaattcatctcttgaatctttcggatatatcctcaagtcgtcacagtcaagcgtcaaaatctatcatgtcgaacgagacctatattgccactaccgtcaccacagaatcggccgtgcttccggccaaggacatcgtctatcaaccaccagcatctgcgcccgtcatctcgtacgacactccaaccccgactagagagctcgctgaccctcatgaaaccttggtagcgacgtctgcgaattctctatccgagcactctgctgaacatccagaaggtcatgagctcaacagagtcctcagtgcctcaagtgatatcagcttgacgtccatcgcgagcgacatcaaaccaaagagggacaaagagtggaggagcacatttgatcttctggatgacgaagagctgcttgacagtaagaatccgtttccactctatacttgcaaacatttcttctctttctgcattcggccagagcgctaaacactgttcgcatgtgtctgttcgttaaatatcctttctgttccctataaagctcatggatgtgccatcagtaaagatatcttgtaggttgctagagctgcgcgtgtttagccaagaacaggaaaaaaaaatctcatcatctgttcatctctctgtttgtttcgtctctccgtctaccatcaggattcatgggcggatatatatctcgtcccggtcggtcgccttcaagagcaacatcttagggtttaagaccaaagtatgtgcgataatctacttgtgttctttgtcggttgctgatcttttacggtgccgtcggtcttgcgttcggactcaattaggttcacttcccattaacatcagtcacagaggtgtctcccaaaatgaccgccttgatcattcccaacgcgatagagatcgttcatgacggagagactgtgagtgattctgattcgtcatgtattgccactcctcatccgtgttctctaatcagatgtgctaacgagctggtgtttctctgtatctgggtacaaatcagacggtcttctctacccttcccactcgagacagcaccctcgaaattctgactacagcatggaagactcaagctccagaggcgtttgcggcgtttgccgctaggaatcctgaagtagagacccgggatcgatcatcttctatctcatctgtgaactcgacaggctctggtagctcgaaagcgccttcttttgcgaccgctcctgcaggaaccaccttcgctcggccc

SEQ ID NO: 3072 - DNA, 11396 bp, Xanthophyllomyces dendrorhous
tcctggttcatccaacaacaacccagcccaggcctatgccgatgaaatgaacactcggacgcccaccaatggctctgacgtccaggccggcggaaagccaaagaccaaatctggagaaatcgtgccaggtcagatgcacgctgccacccaacctggaagaccgcacatggaggaagatgcgttggacgtcaggtttgcgaccactccccagaagatttgggatttgctatacaaatctgaagagtttactcgaaaggtctgggaaggtttgggattcacaggtgtgtctcgtctttattcgtcactttccagttttatactatgcattactcatctcgatgatacggcgtttgacaactacagacatcaagattgctccttgggtgaacaataagagagactactcttacgttaaacccctgtcaggcaagatcggaccttcgagtgtgatctgctatttttctgatgagatcgttcgtaactcgtctgactttctatccgaaagctagttgatttgttctgacctcttttgtcgctcaatacatttgttttgtccttctattgctacggtttgaatgacttatcacacacccagatcaatgaggatgctgattcgtggtacggaatcaccacgatcactcggacgcctgatattccttctggcaagaggtgcgaatttgattgtcttccttgtcttagcgcatcgatgacaagatcactgacgatcgaactggctcgatattgacagctttgaggtccactcattgactacgttggcctgggagggacctcccaagggtgggtgccggatgaaggcgtcatcccgagttgaatggtccggaagaagcatgatcaaatgtacgtctgcctatcttatatttgttgatatctgatatctgatatcttgaactggtatccgcgatttcttccgaatgacatatgtagctatcatcaactcttcctctatcgagggtcaaacgacttataacaaaactctagccgatgcgacgaaggatgcaattaagaaagatcctgcacagtttggactcggttctggtcaaggagatgatgacgacgacgatatgtctatcaaaactgctcctgccaagacctctgccgctgtccctaccgccactcccaaccgagacgttggcaagcctgctcactccccggctgttggttcttcctctgcgtccaaaaaatcagaatcgtttgcggctgaccagctgaattctatgctggaggatcctgtcaaattggctctcgccgtgctccttgtgttttctctcctgttcaacctgtactatctgttttctagaggtcgggccggtccgagggtagcttcaaccgtgcccttggcgaccgccgggttcaaggtgtctccaaacgcgttcggtagtttggaaagattgcagaaggtcgagcacgagttgaccaccatcaaagcctcattggagaaggcaggagtgtccatctttacggcaaaatctcaggaataaataaagagaaaaaaaaagcagaagaagcgttctgtgttgtacttttcgtttatggaaacgactctcctagtcttttcggagtttctcccttcctctggatccacccatctgttccatacttgtcctctcctttctccttttccttttctttagtccatgtccctctgtgtattttcttctctctcactctagttcgtcaaacacggatcaaatgactagctaacaaaaccgaccagtctcttctgttcaatttttcaaatgtatatttgttaccttgagaacgtcttaagaatcgatctgattgacgtagccttactcgatacacaccgatcatcggggtgtcaaccgatagacagggtattgctctttcatgattctagccgctgagagaatcaggggatgagagacatacgtaaaacgaatgtgaatctaagccctgatctatcaagataaccctatcacaaccccaactcggtagtcattcggaagtatatgcgtgcgaatgatcccagaaacgcttccccatctcaagactacacttgtgtcttttttcctttcttgtttctttcttctttctttctttctgtctgtacctttccagtccggtccttttccatcttgtaacgatactggcttgtttcatcgagttttagttctaaagagacaagactcatgcactccaagggcaaagaaggaaggcgaagatgatcggttatggcagattgtttatcattgattatctcgtttctttttttggggaggacaggaagagagagattatataacctgaaggatgagttttaccaaaaaaaaaaaaaagtgaaagaaaatgatatcaatcagtccaacagctcttgtctgaccctcctttatgcgctcgtctcctgttgggcatgaaagagaatctcatgcgcgaaaagacaacaggatagaagggaaacaagcataccttgggtgataaactcatgactttaccccatcgaccgctcctcctcaactcggcagcaacgataccggtcactcgcgtaccaatcatatctcctttctggttcaaaagcacacatgcgttatcgtcgaatcggatggatcgaccatctggacgttggatcggttttcgggttctaaatcgtggtcatcgtcgtgcaagaacaatcgagatttgatgatattttgtacgagcagaggtagatgagattccaaaggcaaacgtgaaacgcaatcagcaagtcgaatagagaatgaaaaaaaggagactcgactcctcccaagacaagttcgaacaagagacgaaaacaggggacagaccggacgatgacagctcgcttaacatctcctcttcgaaccttctgagtctgggcgttgacgacgtgggcaggagaatcctttggcaacactgctatcggctttgctcgctcgaccacgacggtaacctcgtcacctgattgtagtaaaagagtatgagcgactgaggtcatctttgaagagagaaaaggagagatagaggcagaggtagataggaatggaccgtatcttcaaaaggaaagtgtatctgaaagaaaagagactcaccgattttgccaagagcctttgcgggtcgacccataacatcgatgattgtcgcgatgagtgctcccgagttgtcagcaacctggaaggaaagaagagaaggcgtttaccaagatacaatgaggattaaacagatacttgtgcaacccacccgaatcagaaaagacatcccgacttaccacacattttgcacggagtcctaacatattcaataaacgataagtgaggtactgtaaaatggaacaaagtgaaggaaggaagtaagtaaggaaataaggaccggcgagttcacagtccacagagagcgagtgtgtgtaaacgtaaccacaggcaccaggtacggttacgaccccctgatcgtcaccacggtccgagcggcaagtaaaatgatcgagagcggcagctgcgcgaatatgcgggattccccacattaaaaaaatgatgaccgcacccgcggccagccgcctactcccatttttttttcctcctttctctttccttcccctcttttcttactcgttccgttctgatctttttctctttattttggagccttcaaacggattctttctcttctctgctcctcttaccatcacacacaattaacctcctgctcacatactcaaacacttacttacacactcactcactcgttgatcatgtctggagctactactccccataggcctaccgagcctgcccacgatggacagcaggctctctacactagggtacgtgtttcgtcattgtaatctctcttcattgagttgtcgctcgtccatttttttcttcttgtcttttccttttctgtccatgaaacctgtagtcttcgtttgcacaacgctactctacagcgaccatctcttccgtatatctttgccgttcaacattgttgtgatgtacatgtgcttatcattgcttccatctcgtctgtgaacgctccaccatcacatactcttcttcatctcacgtgattgattaattcgatacccggtatccaccaactttcctcggcactcaaattcttctcatcacaccctcaacgacccatgctgcctcttatttattgcacgtaacccgtactatatattcattcggaccggcttgtcatcacctctcatcctgaacttgaatctacaaagagcaacaacggatccgctcttcctcacttgagccaggagagcatcgatgctcacctccgaaaggtcagtaacactttcgttcattggttctatctattctgctgtcacctgtgctcttcagtcgacccatccagtcttggcaccagacatctgacgtagatccaaactatatgtctgtttcaaacggcttcagtatgaggctctcttcaccgtcaagcccaacaggatgaagacgattgtgggaggtctcttggagactttcgccaagggattgggcaagaacggaaacaccgtcgtacgtatccagctcattcttgccttgtcaaagttgaaagctagagttatactgaatatgtctctttatcaatttggaactttcttagcctatgtgtatgtatatactacctctttgacttcagaagaatgaccattaaccttgttcaattcatcttatcctgatgccctacagtacccgcttacgtcttcggagtacgtctcttgacctcactcttgatccatcaggtttgaaattacagaacactgatctttggttgccggcatctctctagtaccccaccggaaaggagattggcgactacattgccgtcgacctcggaggaaccaaccttcgagtgtgcttcgttactctccagggagagggcaaattcgagatcacccagaccaagtaccgattgacggaggagcagaagcaggaggatggaacgaagctgtacgtgctctttactgcccctagtaccacttcaaggacaaagctcatgaccttcgcgcgcgactcggtaatctaaatagattcgacttctgcgctcaatgcgtcaaggctttcctccgagataacctcggcgtcgaggagggacagagtacagatctcgttttgggtttcactttctcttacccgtgtctccagaacaagattgaccacggagagctcattagatggaccaagggtttcggtgcacctaacactgaaggtcaggattgcgcccgaatgttcagagagtccctcgagcgagagagggttcctatccgacttgccgcccttatcaacgataccactggtgccctgatcgcttccaactacgtcgaccccaacactaaaatcgcctgcatcttcggaaccggttgcaacgccgcctatatggagactgtcgagaacatcccgaagatcaaggatctcggcttgcctgacggtcaggagatggccatcaactgcgagtggggagctttcgatagtttcgaccacacctacttgcgtacgtgtcttggcgctctctcctttttcttttttcttttttctttttataatcagattgtgtctcggaacgtatactcaaaagcgtctattttctgaattttgccggttcattagctcgaaccaagtacgacgtgatcatcgacgagtcttccaacaagcctggagagcaggtaaatctcatttcctgttttgggcaacgaaaagttttgtgaggctgatcaaaacgtttcccgcactcgaacatccttatagtctttcgagaagatgatcgctggtctctaccttggagaggtcttccgattggtcatttgcgagctcattgacgagggagaccttttcttgggacaaatcacctacaagatcgagaagccctacgctttcgatactgcattcctctcgcttatcgaggcgtacgttctcatcattataatcctgtttctagcttttaagattccgactaacctcgagcattcttgttctctatacttcctttctgctttgaaatcaaaagtgatatcacggacgagggccttatgaccatcggtatcttctctcacttcttcggattggagaccacccaggaggagcgagtgttcttcaagaagctcgctgagctcatcggaactcgagccgccagattgtctgcctgtggaatcgccgctttggttacccagaagggttaccaggagactggatgcaccgtcggtgctgatggttcattgtacaacaagtatcccaagtttgccgatcgaatccactcggcattggtagacgtgtttggagagaagggaaagtgagacctcattttcttttctttggtttccgtttcgctctttgggttaggtctggctgaagatactgatcatattttgtttgatttatgaacctttcttcaatctcaaagaaacatcatcacccgacatgccgaggacggaagtggagttggttcgtcgatcatcgcggccatgacaaagatccgaaaggacaacaaatgtaagcaccgattctctctgtatcgctactccttttcctagccaggtatagaaagctcacttgacctttacctattcttccttacagtctacgagcacctctagatttcgtgtttataaatatctctttcttatatacatttccggtcatctcttgtagcgcatttctttctttttttgttttgtttaatgtaaagatgccatggatccaacaagataatcttgtcaatacaacgctcgaagattgtctggagactcaaaagttttttttgttttttttgtttttttgttttgtttttttgttttgttttgttttgttttgggaaacaaaatattactatccgagttactaaatctatctttgggggaaataagattacaagatccgaggggcgcttgagtagaagtgaacaagagggagattgattagatggcgccaaccaggtttatacaggcaattttgagttgagatttcgattttacttctttatcttataacccaccgcgaatgagtcatctctgccacatacacttccccaactctattgacctacaaagtggtctggacactgacgctcgatagctttgtgtgtatgtatgagtaggtgtaatggaacaagtcaataagtggggttggagacatagttctgttttctcgtatagaccgaagaagcaaggccagcagacctatcagatttatctgtcgttatcagaatctcccgtagcctccgttcggactcttcggatttcggactttcggcctcgaaccatcaaccggcgctaaagtcatctatatcccgtcttctcgttcttcttctcgaacacttccattgtatcttttcttcttttatataacttcttgtacttgaaaccttcgttctcttgttgatagtagacacacacccgtatatatatcggagagagaggaatacagataccaaaaagaagaccactctcttacaatgttacccccatccgcatcggagggaccctctccgaattcgccttcaactccaccagcttcgacctcgaatccaacactagctttcaacccactttcatccccaaacccatatcttcaagagcctcaaccgacacctgaggatcaacaggatcatcatgctcatttctcaaacacattggtctcggtaccgccttcacctgtgctaagccaggtgacgatatctacaactgccgaccacgtgaccacgccttccccaacgctggtcaatgtggatattgagcatgtggcggtggataatgaccctagattatggagtccgctaaagaagaatatagtacttgccatggtatctattggatcaattcccgtaacattgggtgccgtacgtcctttgccctttctttcttggtttatactctttcttctcggtcattctctttttactcgatcagtacttctggaatgttgtattgatctggaagatacctatctattctctgctggaatccaggcgatctacaatccggctttcgatgaattaaggagtcaattaaacgcaacagataacgaactttcgctttctgttagtttgttcatccttttccaagggtgttgtccgtgagtatataaaaactctttcctttttccatgcgcgcgagaaggcgcattgacaagagaatcacactccgatctcgattttccgttcgggcggtctagtgtattctggtcctcgatagcagaggtcaaaggacgaaaatcagtgtatttgatttcatatgtagtatgtaccccttgtctcattttgttgaccgcataatcttctctcgctcaacgactttgatgatgtgttgtagattttcctcatcggatctgtggtgtcgtcgagggcgaacacgatgactttgctcatcgtgatgaggtaagtttccgttaatgcaactcatattgtctttgagttgggctcacacatcgttggctttgctgtatttagaatggtacaaggtatgcctttctttcaatagatagttgacgatgtgtacgatctcacatatgttgtcatattctcttcttattcatcgttacagcctttggttcttctgccgtcctttcgatcggagcgggaactctagcgtcagtcttctcattctttcttccctagcctcctcgtgtggattcaacaggatgaagatgttgactgtctcgctgtgtcctatcctcaacttgtagtgatatgtttgagccggaagtccgaggatccaagatgggcctttactatggaacaccattactgggtaccagtatgggacctattggtgcgtactggtctttggtattcgtttgtttatttatttagatttcgacgtctttggctaaccaaacgttccaccggatcgcaacctctggcggctcttagtcggaggtgctttaactcaggcgtttggctggagatccacattctacttcatctccgcgttcggtgctgttgctcttgttcgttgacatttcttcgttccattgagacgttgatccggttcattcactgagtcaagctttacgtacccttgtcatcgttcacagttcgccttctgtttcttcccagattcatggcggaaggaacgatcgctggcgtaccaagcggcactcaagaaatcgattgctgattcgcttgtacacgccgaaaagaaacgcaaacgaaaattggccaaaggtttacgaagtacggacgcaacgcctgctccgactcgacccggttcaccgacgaacccggatcctgagaaacttgaacttgcgctcgagagtgaacagatcaatggcaagaagaaaggagggaggagaagatggtggttatttggagagagaacgggtgataaggtagcagatggaacggtcaagattggattgagagacgtcaacccattgttgcctgcgttagcgattctgaaatgcccgtcgaatctattgaccgtcatttcttctggtaggtttcagttcttgatttcctctgtatttgttaccatgattgatctactcttggatctatttctgaattttcaatcttgtcaggtatcatcttcgcggcccagtactccatctcgtaagtcgttgcgttaactctgtatgaggtcagaatgaatcaatgtctgatcacctagttcgaggctcgatctcacccccgttcctcctgcaacagtttcacggcagccgtcacgttcgccgaatcaccttacaactacaatgctctgaagattggtctcgtccttgttgccttcggtacgtttgatatatgcgttcgactctcgtgaataatatcgttgacaaagatctccttctcttactgcatataggtggtggtaacatcattggatccgtcgcgggcggtcgatactccgattacgttcttgctcgtttgatgaagaaaaacggaggtgtgcgtgaaccagaggtttgtccattctccttcctcacgtggatctcacactgtcgtacatttctcaacttctcagcggttctttcctttcttacattgcctgatggggccttctttctccagatgaggttaaaatcagttttcgttgcgatgccaatcatggttctttcattcctgggctatggttggaccgccaacgagaaggtgaatctttcgaactcaccgttctcggtttcatccatacttacatgtgttgcctatttttgacttctgggggcatatctgcagacgaacgtcgccggaccggttgtgtttttggtcaccggtgggatttctgtgatggtgatttacgccaggtgcgtcaaatcattggctcttgccctatcatattctctatacacagggtttctgacaaattgggtggttctttctcgtttaagcgttcttgcattcttggtcgactctaaccctggaagatcatcaagcgctgtagcgtcaaactcgttctgtcgaggtcggttgctatcaaactttcttgtcatatcaatcgtcttgcttttctgtattcggagctgatctatcattgggtatttcttgtttcatttgttaattcgttcttcgctcccccttaacgcaacttggttcgatgagcaggtcttttcgcatttgccttctctcaatcctcactccctattaggaatggaatcggcgatggtggactttactcgtgagtcttgagtttccttttgcgtactatcgcatgcacatgcgtttgtttatgtactggatagatggatggatggatggttgagaagatatagatacctacggtcatgttcaggtcttaaagaagccaaataaactgacgttgaattgtttgtctttgcgactgtttatctccttactcggtacgtcggtgattacgtatgtatccccgtcatgtctgacttggtaggttattctctggcatgttgctgttgacatgcgtggcttttgttgtcctgacgtataaggcgagtatctcttcatttttcataaaatcaatacgtgttggatcgggactgatccggaatgtgtttttgcccatcggggttctttacatgttgctcttcattgtcttacttcaaaaaaatccaatagggaaaacaatggcgagaacccgatcactcttttggttacaaacgacgacatcgtcatgacctcgaagcccaggctcagaatcagactcaaactaaagatcaggagatcaatccatcagatctcaaagatgttcaacctgtagtgccttaaacggggaatggtctccattattttatttacttccttgtccttcagatagatggtcttctgtttccctaattcaaattatatatgtctttttcaaagagtacggctaagaaagcgcacataggttgacgataggatacgacctagatgggccggaagtcaggagaggggttccaagggtttgtccgtcgagatgcttcttcgttttattattattattattaattatctttatttttattttt

SEQ ID NO: 3073 - DNA, 4163 bp, Xanthophyllomyces dendrorhous
gtatcttcttcttcctcttcttcctcttcgttctgctttccttcttctgttcattcatccattcgcacatcgtgatattcttctctctgaattgattcattccgtttttcacgcctggagagacaaacgtttagcctcattttatccacataacatatacattcttgtgtctccctctctctctctctctcttccttctctcaatcacctcctggcccgttatgcagcccgtcagcctaccaccgatttcatccttcgacttcacagacagttgtccttcaccgtcctctctccttcctgcgctcgcctcgtcatccctgggccctggaccaaacccttccctccgtcggacggcttcaactcactctgggcaagacaggtcgacgtcccatgaccggacgcatttctcgccctccttgtccaacaggtacgtcacacacgtaatcagtttctctcaaatctcccggaatacacaacagcttacatcttgtttcttctgcttcttcttcttctgtttccatgtatcctcctcttccttgctcacagccgccggttatatgccagtgaagcctacgtcccgacgctcggcaccctttatgctcacgaccaaccgaaaccgctcggactacacgaaagctggccgtccagtcagtcacaaccaggacaaatctattcaaatcactcccatcaacggccagcctatatgtccagtccatcctatccatcggtcgatctaagcagacacgaacctgcccagtcttcccctcattctatccagaatctcttaaacgaaacaccggcgtcgacctctgcctccaaacactctgtccatctttcggtccactcacatccatacagacgtcaggcgtctcctcaaagatcaatcgccagtcctttatatccgacgtttgaatccatacagagcccacctaacttttccctaccccgactacctaactcctcgcctcgttctgcttccaatcatgacctttcaatctcctcagctggcgttatcccggaccgaaaccggacggagtctcctcctagcacatcatcagaggagttcacaccgcacttgagggcacctatcaaccgagccaccaaggcatgcaactcttgcagaactagaaagaccaggtgtctcgtccctgtagacgggccggaaggcgaaacaaagacgacctgtgtgaggtgcaaggaggcaaagatcgagtgcatttggtctggaggcgcaaagaaacgtggaccagttgcagggtaagtctcttgccttccatctactcttgacatgtctcatccatccggctgattcttatgccttccaaaaacgtgctcattctggttcctttcttctctttcttttcctctcgcttttgcttcggctttgaatccccctccctttttcagttctagttcaaaatatggtctcggaaaactaaaggccaaactcaagcgcccgtcgcccgagcttaggcagcactcctcaccgaacctgtctgatttgactgctggagaacccgtttcccctggtcacgcagcccagtctgtctcaccatactctgacaaatacactcttcctttcttaactccttcccagtcggaacgacaaaactggccgcctgtccagtcgcaggcagcatttgcgtcctccgcctcgtcctcactctctacttcttcctcgtcttcgtcatccttcctgttgacccctcgatcgccgttctctatggagtctcttcctcccctggatttctctcgaccacaagctagagatggaagcggcagtagtggctccggcagcgacggctctttcaaaccttattccccaaactcgggatacccaagaacgaacccgttctttccgtcttattcgaaagtaccggctcatccttccttgatttcacattccatcaacgtcagtcctggccgatattctggcgaacgagacggggtccgccacctctattgagggtgtattcaaatgagggcgtagagatggaacggtagatcatggcccagagatcaaggaccactccctgcttctttctcttcttatcttttcgcttagcatagatcctcacgttttcttttgtttctcctacacaaacttggtacatccctcacttttcgtgcctccactcccaagtttgtttatatgtttctgtcttgtttcgtttctaagttatctttcctaaaatgatgtatacctcaagatcttcgtcgctctgttgtatcagtttctcccaaaccgtcgtgtcaacctctctttgcttcccttatacctccgtcccgttctctctcttctctttccctttcctttcttgtttatttctgtatctcataccacacaaacgaatcatcgaggaaacaatacttcgagaaggacattttcagcttctgtacatgattgagctgatcattcatatcgaatacttttggtcctttctttcgtcacgaagcattgtcaaataacggaaagaaaggttgtaatctttaaacccgctgtccggttcgtcggtctaaatcttagattctcttttatacatgcattcttctttgccacagcatattgatactgtcgagaaagaggtttttctatctagaccgttttgttaacgttgatgaagagcctgtcggaggaatcggtcgcgtcgtttagaagatcagactcggccttcatgctttccgccaacgaacgaggttccaacacccaggcaacagcgcgacctgtcaatctgtgctctcccctatccgtcccctcttcctggccgacgatcgacccaccggttgccttcgccgtctctatggacgattcttctacacgcgtcccggtccctagacttggatcgtccaacagactccagagagacctcagactgcttcggttggtggtgacagtcgtcatctcccgttggacgccgacgagtagggagtcgagtgtatggggggttaatgatgcagagggtttcatcgaactgaccgatgggtcgagaagggctcgtagggtgggtgccaagttatcgaacgatgagcctgagctcgggttcacatcggatgaggaagagggaagatcgagtgagagcgaagcgaggttgggtatcgatgggtttattgatgttggtgatggcggcgatgatgatgatgatgatggctctaacggttctgctgttgattgagaagattgggtagggtgcaaataaatcgaagacaatgcaagatggatgcttcccagttgatcgttaaacctcgattccttccagaatgatcgagctctcctttcattttcttcgtctgtccagtcaggtcggtaaaacatgtcttccgtcctttcagtctcgtcctttcctgccagctttgcgcatattcctatcaacctttcttttgcctccacagtcgtccaacatctaatcctcttcgattcacccaaaggccctacgctagcctccagagcggtcgaaaggaaccggacgagttcgctcactatcggcgcctggagctcactttccagctggatcgtcaacgccctggcgttggagcttcctccgagcatcgccttggtcatctcttctggttttttgatagagccgttcttgaagtattgtctgacgagtggtttgaacacgccttcggtccctccgtcggtcggaagtggcaagtgacagatcgcggatacgagcgccaggagaagggaaaggtccaggtttaaatccagagtaggcagaagaagacgcaatggtggtggatgggaaatcgaataatgcgccaagggtacaggcgctttctcgagcacagaggaagagggcgtggacggtggagttccgtgaacgacagagatacccatggacctgatctcatgaaccgttctgagcactcgaccgtcgtctccaggtccacctggttgaagtctaggaagctgaagttcaatcctcggcggaggagacaataagttggccgcccggagcatgaaccgagcggtcttgtgtaatgaggtcctcagatgatctgggttggcgtctttggataggactgaactgtccgaatcatcggagaaagaagaatccgagttgtcgtacgaatcctgctctaccagttcgaacaatagtcgagagttgacgatggcgagcactttgatccaaagctttccgccgtccgccaacacatggacc

SEQ ID NO: 3074 - DNA, 33527 bp, Xanthophyllomyces dendrorhous
  misc_feature (20587)..(20596): n is a, c, g, or t
ttgagcgatcctggcttgttgaatactgtggcttcggatgaaagaaagctttgattgaccccgacgactggatatggagcagagactagagttctgtacaaagcgagtaggtgaggagcgtttgatgacggcaagttactcgaccggggagcttcgaatacctaatcatcaggtagagttcgtacacatcgaagctcgtgagcgagagaaagagcaagggagaagaagaaggacagagaaacatgcgcgactcaccctgtctagccagtctatctctttcttgaccgatgctctaagcttcttgagaccgggaatgtacagcgactgtataggcgagtccccaggggcgttctcgtcaatgatcggagggggcggaagccgaaaggatgccagtagaggagtgatctcggccagttgatctctgtaattcctgagagaggcaaacacggcctctgactgatccatcttgagcaagacaaataaagcaggagtgtacgtctgtggtatgtgtatgtgtgtgtgtgtgtgtaggtgtgtgtgataacagagcgaaagagtaagaagtcggtgaaaggtgaaaacaagagaaaagtctgagttcttcaatccatccatcaagctaacgtcgttctcttccttcttccatctcgagatgatctgatcgatctggctttggtgcttgatatcttttccccatcttcttggtctctacctgtttcatcaacagcagctctctgtcttcttgaaagatcaggtttcattcgtcggtcgggcaccttgctgagcaaaacaccgtagtcctcttgactttcgccgtcctctccttctttcttaggagttaaatttggtgatgtcggtcgtgcacaaaaaagaagcgcaatccggaaagcaggacatggatgtcactgtagaccgtttgaatctgtacgagagtttgctttctattcgtgtcctattctggttgaaacacgccgaacacgctcatgatgctaactttcgtccgttcactcttactctcccgtgaaacttcaaagcgtattgaaaagcctcaacactacgttgaccaaggagctaaatgtcaaagctccatgggatgcagacatagaatcccaacggctcacgttagtagcagatgattcctgtctttgttaggatctgtgtgttcttatgatcggctgaatgaaatctggtctgatcgaatcgaccctccgtctactcagcattcgtgggaactacgtccggatcctcctcaagtttcctgaccaggccgacccacggcatcttgaggccctctggattcaaacgacccatgcgttcatcactcgctatagagctaggatttctacaccatcccagccttctagatccgctagttccaacaacaaaaagaaccgtcgagacatacagtacgagaagaaccgaaatctcaaccggtttgccacgttcctcagggaagaaatcaaattctacaaagcgtttatcggtcgaatagcctcagcctacgaacttgaatcaaccgaaaaattcttagaagggtttagcaatgagaacagatcggccaaaagcttggacggcatagttccgttgaaagaagccaagtccaaagggggagccatggtcgtcagaggattcatctttttaggcgatctggagcggtacggagagatttatgctgtcgggaaggactctgccacaaaggagtctgggggacagggaaaagcaatcaagcaatggctggggacgtttgaaaagcagtccgagggatttgtgaaagctaaggcaatgtaccagatcgctcatcttttagatccagacagcggttcgttcgtccagtcactttcgcaactcaatccgattctcatatctgtttgtgctttcgttttcttgcaggcaatccattcaatcaactcgccgtagtagccaccaatcaacaggatatctctggcgcttcttatttgtaccttcgagctctggccgtcaagggcttcttcccaacagcgaacgagaatctacagcgtatccttcgaaggccgatggaccacttttggaatagattggaagaagtctcccatagattctatcattgggacagtaccactctgctttcgttcaccgaagacttcatagtcctgataggtttatttgtcgttaacccaaagtgagtcctctgcatacgtctcaaaatgctaagttcggttgatcttacagttgttatccttgattctttttccagtaaattcggtgcttcagtcacctactccacttggttcatcgccgaatatgaatatctgcttgggcgccaactgctatcgactgaaataattctacgaacgttcgtctctctggcttctgttcactggagtaaacggatgactcgccgagtgcctcggcttgaaaaagagagcccccacagcactgctcaatctgaattagccatccttgatatcattctcgacatcatcatcgtcaccctcgatattgttgtcaatgatctgatagagtgtctcgacccggtgaagcttgcccgataccacaatcgaaaagagcgcatccttccggaagaattggatgccagaagtaaagaaacattaaattcaaaagcaaccgtcgactccatggatcagttctcaagctacttaacagttattctaagacgatcacttcccactcttcgggtaatctcgaaatggattcggagccatcaatcatacctatctggaataagtcaaaatcagtcgatccttgcgtcaacaagcgatgagccactccggcaacaagtctctggcaaacctccctcttgcgcacaagacactcatcgatctcaggaaaagattcagggaacttatcgagcttacgcggatctacttaacgttctcaacatcacgttcccaagcacggagattgtttcgattgatgtgtcgcttgaagaggattttgagatgagaggatttgggccaactcataaactcatgggcttccagttccatcgaacgggcgatatggaacgacaaaccctcggctcacgcggaggccatccgaacagagaatatctgatgagagtcagtgatctgcaaaaggacggaacgtatgctactaaaggcgatgtgagttcatctgtaacatgcttttctctaagtacctagaagaaggaaaagtgtagaaactaatttgatatgaatttttatgctaccatctgtatcacttgggaaatagacatcggaccttttcattatcaaatacggccgttacgcttatcctcgtatcaaaacttcaaaactcaaaaaaagcaaagtagaggatcgactgccgtcaaatatcaatacacttcacgatgagattaccagagaagcgtggatcggtggacgagctggaaacgtctcctttgacagaacagacctagagaaaccctcaagaatccatgccgatcctcaaaatgtaaaaagtgctgatcatactcctgagtacgatatggtccctcctgccattcaggccgaatctttatcgacacctgatcgatctcctaaaccgatacgtcaccaagggttgtcgaaggaaaaacctttctctcagaatattcggcgcactcacccacctaaggatgtctctgaatcttctgttcctctacctaacactcgatccactgaagaagaaacagtaggcagcttttccaagccccgcgcgagcgcgtctgagacttccctttcgatccaaactcctctcgaatcgcccgtcagcatcgttgacctcaatacattccctgataagcattctgctttcagacattcccagaagcatcccgtatctcctccgacccttccatcagcatccgatatcaaagcagcggacttggctgcctccttacaaaactctctgctccttcgacctgagacgcctgtccaggatgaagagtcagcgtcagtcagcacggggacggaggacgatccggtgaacagggctatgcgagccaccttggatgatgaatcggaggtggatatgaacgagatggagcgaattcgagaagaaggaagatacaatgaagagatcgagttatctgcttggtcatctagtaataccgctgctgctccggccgaaattatcaagtgagttaatttttcctaccctgtcttttcaagaacagattctaaatactgctactgttcatatatagccaaggacacaatctctcgccgtcgatcaacccgacatcatctccgaatgtcgctcccagtgggaagctcactgctctagaccttctcaatcaaatcacatcttcctccggcttacctcttgcttctccacttggtggaatgggaacaccatcgcctcttcaccgccctcaatcgaacctccggtatagtcattctatggaacgaaaggaatccatttgggccccggacaaagaagattcccccatgggacgagatgttattaccccgtcttctggattgggctggtctaaaccaggagagaccacgtgggattcacctggttctatatcgaagagtagctttggaacacctatagggaagaggtcaccctctggccacccgggcttgggaggatacgagcaatcaccctatggatcgaatcagtcggcgaacttttctcaccatttttcttcgccgcatcctgaaacgtttgggcggtccactcaaaagtcgcctttgagcgcacaacggtcaagtttggccgaggttggtaggtcgccaacagatcaactctacggacactttggagggcagagagaccggctatatagtttgcctaacctagaggccggagctttgcctcactcggcttaccagcagcctagacaacaacaacagtcaccatcgtcgtcatcgttttcacctctctctcaccaaactcaccaaacatatgatccaagccctccaattggtctcatgattccttcctactcgtcgtccccctcccgtagtcgtcagccatcccatccgtcccctttaggtaacatgttcacagatcaagccagcccttcatctctgccgagttattcctccggagtttcacttccttctgggccgacggctgatcgagcggcttataacctaggagcatatggcgaccatccgtcaagctcacatcattggggccagcctgcccctgttctgggtaccttgctgcaaccccaacagcagcaacagcgacaatccaatttgtcaggttcgattgaatcgtcggcctcttatccgtccacgttggatgcacaacaagaacaacaacaacaacaacaacgcgtcttaccgaactctcatggatatactcaacagcagtggaacatgcagcgggattctcagtcacttgcatacgacacaacggctgatcagtatttccgaaatctaccacaaccacaaccacaaccacaaccacaaccacaaccacaacaacattatcatcatcatcagcagcagcagcaagaagatgcttcacaaacaggactcggcagaattggacctggaagtgaatttgggattggggcaggcccaggtatggggtatgagcgaccaggaaacatgtggaattaacatcggaaagctttcgtttttgccgcgtgtttttctatttcatactatgctcatgcacatgccctatacagaggagaaagaggaattgataaatcgaatgatgcgagagactgagaaagatgacggaaaattggaatgtgagaacgagacaagaggcacaaggaaaaagattgattcgatggtatgttcgttccgttgatgaagtgttttgaaaatgatatagatgtgtttttatgaatacatgtacaacacatctaacgacaaaaaaacgatggaacggacgaatgactacaacgaaatggaagagactaagaaaaagaaaaagaaaaacaagacaagactggaaaggatgagcatacgacttgcgctcaactctcaactcagaccctcccctcctcttgggtcacttactcaatcccggtcagaaagaacttttgctccaaaatcttctaggttgatgaacgtcttcatctcttttctcatcaccaaaacttccacacataacctctctgaaccgtcttcttcgtcctcttctcttgtgactcggtcctcgttgttggcatcgttattagtattggcgtcagtatccgaaccgacgacggtggcggtggaaacttttcgagatcgggcatggataactttggtcgcatcactcacaagaccagacctaggaagaagtgagggaggcggtctgtaggctctcaagatcggagacggaagtgagtttatatcggatgtgtctgccatggccggggtcgtcgttgtgttgttgttggtggtattatcggtggtggcggtgttggtagaactagatgaatagtctgggcatgagagtgttgacggaaggggaatatctccaggtcctgtaggtgtcgtcaagaatggactttcgatggaattttcttcttcgacgttgttgtcatcatccaacgaaagaggactgagaaacgagagatcgtcctcgaacattctgtcgacctgaagtagatcttttttgggaaacgtccgagcggcggcagcggctttttcggctttcttgagccgcctgatggctgctttggcttcgtccctcgacttcttatcggaataagctcctccgtgtttcctctctgcgcctacaagctcttgatttgagatcgtctcgggatgatctgcaggtcgttcccctaccccaagatctaaaaccgcaaacatttctagatcgatatctctgacgtgggctcgcggtcttgcctcgtttgtatgtattgccggcagaaaggctggttggtgttgcacaggattggagcagcttggattagctttcggattagatgttgtatttgtgtagtcgtcatcatcgtcgtcgtcgttgtctgaatcgaggagagactcaatcttcttcttccggcttgagcgatttgtatcatctggacgaaaggcgcgctcgatccggtttggtccaaggggatcagaggtggtaacagatggtaaagatgaggttgagcccgggaaggttgaccgcgcatgatctgaggatcgatgtctcggtcctctacgtcttcttcgtccgcctgtgccgaatctgttgatgaatctctgtccgtgggtttcggcgttctctgggccccattcaacagcgggcgatttcccgtcgatcgaggcttgatgggctccgttcatctgtgctagctttgcctcccatttcgtcgactttcgctgctctctgtttgatgcagtctcttgcgaggcggcccatttgagccatttgcctcgtttgccggtttcatcgccgaggtcgagtgtgctggtcgacaaggccgggagacggatttctttgacgacgagcacggtagcacctagttcttctgccatcttttccagtgtccggagtgacgacaagagttctgatcggggaagaccaacaagagttccatcatctatgcgcgcgggagatcaggatcgagcgagggttagaacggaggatatgagacagagacagagtggagagactggctcaccaagcacaccgatctcgtagatggcctccccacctccttccaatagtctccactgaagctgagtgacaagccgattgaatctgtctggagtggcggccgagagtttgagtttgtactcgatgtggcctttttcgtctacttctgcactgagcctctgaagaccgtccactggggatgaaccaggctcaagatcggtcgatgagattcgcctcgcgagcgagttgctttttctgatccgaccgccactgtcgaagctgatggcgagctgtgttgcttgatcatcatcatcgtcatcattaacgttggcatcgtcatggtcatagtctccgccttctgtcggtcgtttggacgaaagttcagacaccgagtcatcctctgttgattcttcgagtgactctgccgagggaagcccttcgtcgatatccctatcttcgttatcggattcgaaggtggagaactcggagagcgtgctgtcgagaagatcgcacggaagatagttgatgacgatcgggtttggagtgccgagctttgagcctgggagaggtaaagggtagagaagcaaagaaaaggacggtcagtcgagtcattcttggattgcccgcgggaatgaacatgaaccagggtggacgatgatgagacgaacgagggacgttgatgtacgggttcgaccacggagacgggagcttaggcgactgggacttgtattcgccgaacatgatctgctgttagttgcgatattcgggtcgacagtaagatataatccgagggagagaaggtatgagggtaccgccggataggtctaggatggttccgggcgtggtgtttggactggtggggagccgagatgagacttgatatcgataaaacacatgcacacagaggcacgtgtactgtttatgggtgagttcaacaacagcgctctcaggctcgtattgaagtgatcatctagaacgacggggggagctttgggatgagaaacaggatcgtcgtcgttggaggttgaacgaggattcccccgggggggaaacatccggatggtactgtatcctggggggcttgcttagtcagcggctgcctaggagtagcgcagaggattgcgcgctgctggccccatgggagtatctggtggggatcgtttcagagagaacgggaacatctagagaatagtagagagacaaagcgcgtgtgtttgtgtatgaacagaacaagaagagacgttcggtttgtgaccaggcagaaagaggtgaaagcggtcgttggccttgctggtagagtgccatcgctcggctgcgttctatgtacatcacatcacatcacatcgcctgaagcatggtgagaaagaccgtctttcctttggtatgcgacagttcatggtatacatgatcgcacatttgtatagccttgaacaatggaagacaatgaacacacaccagcagcgaatgcgctcatcctatacaccagacgggttacgtctgtacgcgttgcacataacgatacgctcatctgtggcggcctccctgatactatgttcgccaacatcgtatggcccacctcggtacttttgcccagtagtatagctaataaagtcacttacgaccatgtcgttcctgatcactttgttgcttttgatctttcgagcttcgttttcgaggaatgtgaggttgtgtgtaccaaacactttcagtcgatgagcccagagagtatacgtcaggcctgcctcgtcaggatcgagcccaaattgctcggacaagaagtcaaacaagctcagttccttgacttgggatagaacctgacccttcctgaacatctcgttcagaggcagctggtatgtgtattcatccgaggaacattctgattccgtctcgcaatcgtactctccttcttggtatgcgcaagcttgcgatggttccgtatcaggttgtgggtccatgctagtaatgcgccggagtgtcgagtcagatcttctggccgatagttcgtcacttggtaggagttcggagacgctaacgaagaaagaacaaaccatgagactcgtcagatgtggcaaagaacgagaacgagcgcattccacgtggtagaccgacacaagcctggcggcttggactgatcgaccatctgtcaaacagatcactcacgctgtgtctctgtagtctttgaacagagtggatgaggtggacgaggtggacgagatgaaccagatgaacgcttgcccccaacctggctggaccacgctggggagggtttatgagccatccgaacggactacaaactttttctaatagcgactacaaaacatttgtaatgagcctgacactacaaactttctctaatggccattagaaaactttcctaatagtttttccaccgcctgttttctctcttggccgtccgaccgtcgttcttcctgctcatcatccaaccatcaccccccgagtcgaagcgatcccatcgttcaacattttctagcatctctccagtcgctctcccccagccctcgctcagcccagtcagatgtggtccaagttccaagcaaacctgccaaatttggcaaacctccctcctttgccccaggcgccaaacgtcaacatcgccaacaccttcaagaccacagtccaggccggtcggtcagtatcctcttcgttcttctacaacatctcacacgcttttcttgcttttcgtcctgatgaactgacatgtatctgtgtatccacccccggctaatcaagtgaacgattcggaaacgtctcgagtgacgagatcaccgagcttcccaagggtacatccccgtccagccatcttggtatcttctctggctcggcccgtatctgacctcgtccttctttcgttctccctccaaacagaatacaaggatctcgaggctagggtagacgccctcaagaccgttcaccagaacatgctcaagatcaccaaagtctacgagaccgagtaaggttttcttctccgtcccgtctatggccaagccttggtgtctgctccaacgtgtctgattccatttgttattctcgctcttcgtcttctccctcgtctttccctcacctctgttctcttccttgcggctcggccttcttgatcgttccccatgttcattcctgcctcgctcgtctacacatcatcaatcatcacaaacaaccaggtcgtacgactacccgacccaggtatgtattactcttcaaaccacctagccttggctccaagaaacacgaccaggctcgcctgacttacccgccctcatttctccctacttttccccttcgggatcgtcttcctcagatcaccgagtccgtggccgagcttggtggaaacatcacccattcgttctccttgtttgcccagaacaacctcaaggtatcgtctattttcttctttctctttttcttcccttaaaacggtcgtctatccatgttgtccatacatgacccctttccgctccatgctcaaacaagaaactcataggcttatacccatcctgactctcctcttcactataccgccctctcttcgttctccacgctctttcccatacctgtctcgctctctccactccaaacgcctggttctaccatcgaccccgagcagggaacgaatcttcctttgcccgccccgacagccgctcccgtcgctcagccaaagacccttccccacgcgctctccagagctgcggcctcatccgctgtggaacttggcgatggagatgaaaagctcggcaaagcgctctccagctacagtctcgccctcggcaaggtttgtatctctcgttcccttcggccttccttacgttgtcatcagataccatcacctcaccaagcttttttttttctctcaccgttccatctatcgtctccaggtcggagaggccaggttgtctcaggacgaggagatcgccacccggttccttcacccgtggcaacgcacgctctctaccaccctcaccctcgccatccgagctcgtcagcacgtcaagcaagccaggctcgagctcgattcgtccaggcaggctctcaagaccgctgccgccgccaagcaggagcaggccaggctcgaggtcgaggagaaggaggacgagttggtgagaagaacggaggaggccatcggtttgatgaagaacgttttggaaaacgtgaggattgtcatctcttctgatcatcaatcttgctccttctgatgcttgtacggctttggctcacaactcttcttttgccactttacagcccgaacctcttcttcagttgaaccagctcgtcaaggcacagcttgtcttccactctaccgccgcagaggccttgtctgccatccagggtgagatcgaggaggccgccggaaaggcagagacagagtaccggttcgtctcattcttttgcttctcgtacttcaggttgatgccgcgtacgatgtgctgaagccaatgtttcatcaatactctaaccctctttagaacctacagggcctaagatcagttccctcgtcgttcgcactcacccagtggttctcgtctcctatgtttaccttttgtttaatctcaaatttgtctacagatgactccctctttttttcactatcttcggtcatatatcttcgtatctttgactgaactgtctttcttggtcctcggttctctaactttgttgttttcttcttcattctgtcacttactttcttccggcttgtttctgatctctctgatgatgacaaacgatctttttctctatcctctccccgtctttccctccttctcttttgtttctttttatgctcgcgcgtgaaaaaatatagaaaggataaagtacatgatgattcacaacatgatcaacacctcggctatcaacacaccacaacccaccaacccactcactatcaatactttccaatttctatcacatcatcatcatcgtcggtgatgaatttcacaataaaaggcgagagaacatcgaagtgagcaagggaaaaacagagaagcgcgtgaaaagacgagaacaaggagatgaatgaacacgcactgttttaaaaattcccgagcaccaatcctgatgcgaacccgccaaataaaaagaaaatcaaatcagaacaagacaaaagaagaaaagaaagaaataggccattcagtttggtcgttcctctccactttcgacaccgcctattttcgcttctgtatgatcgtctcgaacgttcctccacagaagaagacgcatgacaggaaggaaaagatggactgacttgatgcctttttgactcaacaggtctttccatagtaaacctgcgagggaagcagggaacgtgaagctcacagcacctatgttactcgccagtgccaacgctttttatttgttcgttccaaagtcaaaaacgagaacatcagcacaagggtcttctagaatgtcgctaacgcgtgaaaaggcttcttacagtatatcgaagccgtcagatgtctctgaggtgggttatatatacttgacctgtccaaccaaaggatcaccaaaagtacgtgatcgaaacatcagtcattcgaaacaagacggctcagagaggagagaactgaccaggtctcgaggatagaactcaggaggatgcagcacccgatgttcgttccaatgatgttgcacagcacgaccgctaggacactcatcccgaacacacagcccgtcgtgcctgttcggattgcccaagcctggtaccaagtcgaaaacacccttccccatccagaggaagtcactccctatggtaggttttcattcaaaacgttttccatacacaaacaacggtcagccatgaacctcatcggacactccgagcggccggatgcgtccatccgaatgacagagacgactcacatcaacgagaatgaacatgcagaacgagaagggcaagagcggaaacgggagacgctgcgctatataggtcacagtgggaaatctccgtgagagtctcttaccgagtgaggagagcgtgacgggtggttgaggccgagagacagatccagtcgataagcccaaagggggcacgatggtcgactgcgtcgttggaagacgagaactagattggtgcctcaaaaccggtttggccgtcctacacgttgtagaagatgatttaaaagaagggtttgctataggtgaatccaatgaaaaagtaaatcaagacggatcgttaattcatcccgttatcgactgactcgcaaagaagcagatcaaagagtcgataagctcaccgacatcccccgtgggttctgcgacttccatctctatcgcatcgtcatcagcggggacagaaggggtttgacgggcttcagatggtttgacaatcgaagcgtgtcgaatgtcgtgccatatatcgcgggtgagcataagcagagccgctgggacagtcacctgatgatttcgtgaaattggtttgacgaaggttgagctcgagcagatcaacgcaaggaagtgaaaaacaagaaaacggatgcctactcacctcccatactcctcctaaaattccagctgcactccctcccaacagggcgatcaatgcagccaagaatatacagcttcctatgattgccccccaaggatctaccagcgctttcctcgcgttgacgtcgatctcttcgatcctctccggaatatcctttcgatattggaaaagagagaggaacatgtaagccgcaatggcggttgccacagtaggtagaatgacccaggccgagtacgtcaaaaaggatatcccgaagctcgacgtgatgacaagattggttatgttgctagacacaagcgtcgctgacgcaatgtttgcaacagcaaattgagaaaacacccaggctgcaaatggttcggtacacaagtttgtgtcagatcctgagcagggaggacgagagaaccatatgcatttcacatcttgggatcgaaagacacctcaccttttgggtctactccgttgactttagtgaactgtatgactccgccgagattcagcttcgagacacgacgaacgtagaactcagatcgagaggaatcttacatataccaaaaaaccagtcccggactgattggtgacatcgatatagtgtgagtatgcgcgatcttagacaaaagagatacaaagcgtctttgaagaaactcactaggatgatggcatcattccccataagctgtactcgaaacggcgattcaatagaacttgtgaattcctttttaaatcgcttcccataagcgcatcatagatcgagtgacatactgatgcgaatatgaagaagaacccaaagaatccggcataaagcttccttcctgatggtccgcccttttggctgatcttgaaagcgaggtatcgaagaagaccggctgagatggatagaattgtccttttgatcagtcttagcaaagcgactggatggaaggagaaatcttactggcgtccaacgagatagcaatataggccaagcagataaacaaaagcactgatcccatgaagaaaccaagtatgaaaatttcagtccgaattcaagcacgtttcagcccaaaattgtgtacttttccactcagctccctctcttcaatatggaagacaatgagattgaacaaactgatatcatatggctttaatccatccggatcgcctacgatccctttcttgacggtccctccgtcgatacttttgcttgccaaaaggaccagcacaccgatcaaaggcgcagagaccagtccgaaggtggcccgtcgtggtttatggagatcacatattccatccgagattctgagtacagatgatacccaacagacgcatcgggtgtatagtcttgggattggaatgcgaagtggatagaccacaaagatatctatcagagacgacccagacgaaatcgatcgttgtttcatcagcagtgattcgaccttgggttgcatccttttgtggagctaacgcgtgaagaaaaaactctagtcaacctcaagtctttcctatagactcactaacgacgagaagaatgatgagattggctatcgagtgtccatctatcttgccatctgtctgaggtgccatctacagcaagcacgatggtcggttggtttgattgaagatacgaaagtctatctttccgatcgtttgcaggtaaaacaaattccataatcttttgatcttttggctctgttcaaaagccggttagtcaccgctcgcacgtttattctcttaatctcttcatttctatatctcgtcgcttcattcaaagaacggtatccatcccagcgagcttcatctttacagccatctatggtagtcgatcgcaaccaagggagttacacgagtacagatagatcgagtcagcaaactgggttgattttactcctctgtcttttttttttgacaagaagaacagtgtaagtgtaattgaacaccaacctcgaacaagtaatccaagcattcggcctgggtctttgccttgtcccacgtaggtcctttgtagaacaatcaagaatagatgcgccaatttcaggctggtcagttgagatagaagaagccatcagatcactatgcactcaccccaaacgtagagtccgtgtcggcgcaccaagatcgcaggggctatacaaagatacaaacaggtagcgcgaaaaaacatgctcagttcatgagagtgaaagcgtagcagagctaagaaatactgcataccgtctgggtatcgttccatagcctaaccagatggattcagaagcgatcgagtcatcagttttcagacccgaaaccttcatcgtatcagacctgtgcaggaagagagaagagtaacgagctgatacatacctccgccatagagtctgtcaaatcttcctcatcaggagtgttttcgatgatagggatcgtcagggtatcgaggaatgaaagcgtcttgcccatcccaccgattcgaacgcctttgatcatctacaatgttttatccaacacatcccataccgatgaaagttgcgttcgagagaaagcccaagaaggaaaggggaaggttgaatgaaagcggttttttttaaaaaaaattaaactttaaaggaagaaagaacgtagcgatcttacctcctgatgggagatcttgaactcgtttccagggaaaagcaaagtgaccataactgatacatgttggcagtgagcatagattattcggcaagtgacatcgtctcgacagggtcaagtcacagacgagccgcagacaaatgacgtgctaacaacgggtgagaaaggaagacctgataactcaccggcatgctgcgaatgagtatggatgcaagcgccagcctctctcagtctgaaagccgagaagaaaagcggacagcaggcagactccttcaagccagctgtcgtcggctccctcaggaaaactcgcttggatccaggtcgggggatcgtaggttggggataggggaggacaaagatgtgctccggaaggattttctctttctgaacgccggagggagcaaggaagaccttgtctctatttgaattcatatcggtttgtatgtgtgtgtgtttgtgtgtgtgtgtgtcacattggcgataatatagagagatgaccgagagtgagtcaaccgacaaacaccaaagaacaaaaagctcggaaaaaatcgaatgcaacagtgaaagcagtacgaacccgtcccggatagagattcctcccccagttccagtgacccagcccaatgtataaaactgagcacaaagcgaagggatcaagtttgccggctgcatgaaggatcatcattccgttgagatacgatggtcagcttcaagacttgaaggaacattacctctcagctgacccagacaatgtatctaaggaccttcaaaacggtagagaaacacgtacatgattgggatcatctgaccttacgaggtcatccacatcccgaggagagttttgagaaacggccatgtcaatcagagagtcgagtgtctatatagattggattgggcaaatcgaaagagaaaagcagagcaattggaagccccgctgctacggaggaaaaaaatgggcgaaaaaaaaagaataagaaaattcgtctgtcggccaagaccggtccatttttggagtaacaacaccaaagttcctgccaaagagtatcattcttgcaaaccgaccaggcaaaaagtccaaggcaggtcagaagagtcgagaaaaagtaacgaacatatgcatggcattatcagacggtggatagtaggaagcagatagagtggtggaaaatttcgaaggtcccacacataacgtatgatgtataacaagatagagcaaacatgctcttcagacatagctgagatatatataagagacagacaaaagtcgaagaacgagaagaacgaagagagaaggtctgtatgtacaaagtttgaatattcaaaatgttcaaaggcggtctatgagatctagatgctattcgacgtctagaaagataatagagagcgacctgaagtgaaagaagcgacgaaaagagcaagtagaggtctaacaaacacataagtgggatggtaggaagcataagatatgaacggagagtatgatacgagatgacgttaatgatcgacacgaccggtcgagtgtccaggaaaagagaacgacgtgacgaaagagaacagtaggggaaagaaaagacaacgaattgatgcaaagtatgacacatagagaaagcaaaaagagggtttatgctctggcaacagcgacggcccgtttgaacccgctaaatgccttcttccaacctttgcctttggtctcgggtgattttttatccacctgtccagacgagattccaggtttgttatcggacgacggggtatgaccatccgcgctttcaccagagatgtgggtcagcgcgtcagagaacgaatcgatcgacgctgtctccagagagagcgagttgtaagagcagagggatttgagggttggctgcggttcgacggatcgaagaccactttgtttagcttcagacgttccagacttcgcggaaaacaaggatgagcttgatcgggcgtggtgcagcgattgaattgatcttggtcggtgtagcgaagtggttgaagatgatggggatcgacaaggaaggaccacgctcgaggcggccgaggaggatcgggaaaacgtgggcgcgctgcaagcaaaaggtgaaaggggatccataaggattgaatccgaagactgattgctcgactgtagggaagctagcgaaggctgttgccgcggtctctctaatggctcgacggcccagatggaagctggtcggggacgagctggggcgtgggtagggacagctttgccgagaggtgctactggctttggcgggacggcaggaggtgagggaatgactgtgctggtagttacgctggacaaccttttgaaagaaaacctagacttgtttacgggcttatcctcaattaacaacgtgtttggccaagacgttatgcccggtggacgaccgtcaaatgaagtggatcctcttgcgtccgatcccgatggctctggagaagatggcggagtgattggacgtataggcgagaacatgctgccgatcttaagagtggacttctttcgagagcttccggcactccattgaatagtctgaccgacgctgtgaccgctgacaaccgagtctgatctggatcggtgtccgacgtcagacgagtctggtgttggcggctgctcggggtctgaggtcgactcttcttcctcttcaagcacgctttgaatcagaggcgaccgacggcgaggtccggtttcaaccgtcagagaaggagggggagttagagagctagacgagggttgaacgaacgccgagtttgccgcgttggatggcgaggggccggcggcactggtagaatgagcggaggcgagtgacgaagctggacggtgccgcatgcgtgatcgggaagatttagatttcgttgaaggcgttgtcacgtgctctctgcccaaccgctctgtcgggacagggggcaggcttgatggacctgcgaacccgaatggattacttgatgaattcgtagagtcctcccatccgttctgatgcatggacgagtggagcaggaggatatacagaacagggatagagggatgcgacaggacggatgaatcgaagtcgaggtggggccgattgaaacataccccaaaaagaatgaattgaatatgaagaaagaaacgaatgaatgcatgcataaatctaagatcagtattgtccggaggctgatcgctgcatggttaaggtggagaagagaaataactcaccatataggcgtccgctgcggagagtgtacctggtaggaaaaatgatggagcagaaagcttgatggtgaacggcaagaaacatttgataggggaacagacggtgagcgcacgtacggaatgatctgaactgagggtttggcattccctgtaaggcgcaagacgtgatttgcaaggtcatagacaaggaaaggcatcaacggagaatattagatggtcggggaaacgttgacaagaatttagcttcgggcacagataagcctgccaagtgagaggcaattgggccacgaagagtcggactaattctagagacgagtgcgcaccttgatggcttcctcaacttcacgccattctttgaatatgccaacagtcctgagagcatagtatccgttgtgttgcattatgtagatgaggtagaacgaccgacctgtaaggaaaagttgagtatgagggagtggagctgtcgagaaaaagaaaggagcgttcggtgagggccgatattccaggtagtatatgcgcggcagatcctgataccaatgtttgaggctgcttctgttcaaaagaggaaaagtagatgaggaagtgcgatgggaaacgaaggatggttgacagaaatgaacgtgtagatgattcgaatgtcgtcaagggaacacgtagacggtgagtgtccttgaaggagaaagaaagaagaagaagaaggagtgacagatttgaagcgtgagaatccaaaggtgacagggacaaaaaagagggctgaagaaaatagaaaaaaaaaaggaaagaaaaaaagaacaaaaaannnnnnnnnnaaaggggcggagcgggcgccgaaacataaagctactgaggcggcacgcgagaggaatcgcatgtccgagacaataaaaagaaatggaataaatatatcatcaaaaaaggggttcgcgtgggagaagggaaggaaggccgagaaactatatcgactgggatagccctgatcttcccggcagcgcctcactcatgttcgcgtccccacaccttgctcggtgttcggcgactgcgcgtggttactaacgttgcatgtgctgattagattgtgacagtcgatcgtcaagaaacacgttagagtgggttgatccatcgatcaacattctatctattcttacagctcgacttgatagtcatcgtggttgtcatcgtagtcatttccgactgtcgtcgccgcctcatccgcttcatctgctccacgtcattccatccgaccaaatacttcgccctgactacttccaccacatcgttcccgtcttccgtcttccgtcacccatctactactttccccttgatcggcaggaactggtcgactcggatctacttcaactcccttgcccggtatggtcaaacgagagcgtttcttccggaatctttccccgtttgaaatcgtcatcggcacgaacgctggtaacgcaaccacagccatttccccgggtggctcggccactctcggcttgaagcatcccgggccggatgccatccgattgacggccacacagctgggatcgctcacttctcccctctctttaacatttacactaaacaagaagtcacgaccgtcatggacccaattggatgcctgtatgaacgatgatctctcagatagaccacccagtgtcgcaagcgaggacacattgaggccgtgtgtctggagacgtctcaaggtctttcagaaggtgagtcgttatctttcgctcttctttggttcggtagatcaatcttaatctattctttgtttactgaacaatttacgccattttccatcgtgcgttgtttcatacagggacaagaactcttggcactgtcgacacctcggcttgatggctggatggcacacatgccagataccatgtcgcttggtgatatcagcctgcctgggacccatcagtcaaccgctctctacggagttccggtcagccaatgtcaacagcccagcacgcctctcaaagttcagctggccgatggaatcagatttttgggtaagttagcggcagccttgaatagtattcctcgggacacctgtgttgaacaattggtcgttcttccaaaacagatgtccggctggcagagaagaaagggaagctcatcgcttaccatggcattcgtgagacctcggctcatcaagttggatccaatgctcacactaactgactagttaacttcttctcatagtcacccagcgggcgaactttgaggatttgctggccgatgtgaaggccttccttcagagtccagagtcaaacagagagacggttatcatgtccatcaatcaaggtggcgcccctttgtttcttcatttctattcttttctttctttgttttcgattatttttgtataattcttttgatctgataagaacggtcttgtggttctccggattgatctgatcgaccaaatagagaacgcgtctacagagctatttctcaccatactcaaaggctacattcgggcatctgatccttcactttggtttctgggtacctatctctttctttctcatcttccgaatgaagaatataccacagattgactttctcacttccttgttctccttacgctctcctccgaatagccaaccgaattccgccgctatcacaagttcgaggaaagattgtgctgttctctcggttcggaggggacgatgaaagttggaaacttgtcggtggtagagggattcaccctattgattggccgaattctgtccaggaaggtttccagactacacttccttctcggccggctggtgaaaagagggatgatagtgaggatgataactggggtcgtacgttcggtgtaaacgattggtctgtccttctctttttctcgctcctattctttctttccagttgatttcttccccctccctttacgttttcttccttatgctcatttgcgctcgcaggtacgacatcaatacaattctctccatccctgaaaagacagacacaatccaacgcacgctatgcaaagaatctgccctggacgggcatatcccactcgtattctgttcggctagttcgttccctctagcttttcccgtcaccgtcgctagaggctttggctggccgagatgggggttgggcgtgcaaggtgtgaacgatcggatggtcggctggttggttgagagactggccgctggtgccagtcgattgaacacaaaaccaaaagaaaaagagaaagaagagcggaacatgaccgcaaacgacgatcggaaacagtccagtcagatgatcagaggatggatcctgttcgatttctataggtcgccagatatactggtcgataccgtcgtcgcactcaacttttgttagtcacaacgggcactaaagtcggcctttttggttggcgctgtctgtttgtgtgtattcttgttgttttaaatactgtaaccacatatctccttcatacagaatgtccatttttcataactcaggttgcgttatgtttgttgatctatcgttacagcgaataaaagacgagaaaagaactttaaagaaaaacactagagtgtatcaaaagtcaagtggatgaggggggaaaagctatttctgaactgtagagaacaaagagagaaaggagaagaagtagtggtacaaaaaaaaacagctttgagccctctcgtccagctccttagctcccttctagagttgatgagagaatggattgacaaggaaaaaagacaaaagacaagataggaaacaaccaaactcaatctgatcggtcctgttcgtcagttaaagctttctccacgtcctccttagcgagagaactgtacccgctcggtctaggtgatcccagggcggcttccttggatttcgcatacacgtaagcacaagagcctagaatgattgcactgatcgaggctcctcgaccactaaaatcgacaagccaataccgagaggtaagaggggaaggtagatgttgacattgtcagttgagtgtatttgtatgcgcgtgcgtatagatatagatacttgtatcgagaaagatgaagaaacggaacgtacaggttgatgatatctccgaataaccagacactcacacccgtctggatgacacctcgggcggccgagctaaccctataagcgttaacattgattccggtgatcagttcaaagtatttctggatctcaaagtcgatcaaggacgggagaaagagaacacgctgggaaagcttacatgtgcgagactgggctggtgactttgattgataacagtccggcgagacagatgaagaatccccagaaaccctgatttacaaagagatggataagaacggttaattcaaattccactcagcatcatgtctggtccctttcgtgttccctaattgttgagcatacgagaaaagtgactgacggtgatagttccaccccagatgaatcggttaagcaaatcaggatccctccaagtcctcatgatttctggtccttcaccgatcatcagactaataggcaacaaggcgatggccgagaggaagtttgagtaccaagcgagactcatcgtcgagccatcgacgacgggcaagctcgatttgattgcgatcgcgtgacaggcggtcgtgatggacgacagtacaccaaacatgacgcccatcctgaaaaaaatattgttgaggacaaagaagctgagttcagcaggatgtttgtgaagagggtctcctcatgagtgtcaaagaggagcttcttacgggctgatcgagttctgagcgtttcctccccagatgatgccaataaagaaaccagagctgacgatcacacaggcgacgagcgcattcctggatggaagactgtggtacgcgatgaatgtgataagaacggtaagaggaaggaccatccctctggcgacctgagttgaaaagaggaataatacatagtgagtctttctgtgcgcacgagagggagaaaaaaaagaacaagaaagtcggacaaacctggtagaatgacgcatccacatattgaagcgtaaaattattgaagctgtgagtaaccacacaccaggaggaagaaaaagataggggaatgattttcaatcggacagaaggtcagtagagatatttgtgtgcatatatatatatatacatatgtcagaacgaagggttacttaccagagaccggtaacattcaatgcgagcaatttccacagtccctttactgtagcgagcgacattttggggatgacaaacactcgagcaaagtgactgattaggaggagaacgacggcaatggccaactgaatgaccaagaaaaatactggaatcgatgttttgatgagaacctatccgatggatgaatatgtgaagaggcaaacatgagctatacgactacgcttcaggcttgcagtctcgaaacagagcttacccatttgttcacagtcaccctgagatgaatcgacaacgaaaagagaaaggacatttgtgtccgtttgtgagctgagatacactccaaatttgatcaagggtacatttgcgatttgaaggagtgtgcgcacatctgagcaaaacggtgaccaacattccacatcaatgagcatgccagattcacaagaaattaaagtcaagggcaactcacaatgataccagagatcatataaaatgtgacggtggcaatctggagagacagtgttagacaaatgaggctcaaaatgagagattgtaccttggcgtttctaggatttcaaaacttgaagtttgtcacccaataaaaagaaggcgatggcttaccaccaaagccctagaaggggctgattcggattgtgaagacattgtctttttctcaaactgaatgataaaaggttggtgcaatcggaaaaaagtagcaaagttaacaggttgcttctcgtctatcagaacagcaaagttggatgaagagggcgttataacaagaaaggaatgaggatgaaggaaagagaggaagaaggcaaaggatgcgctcgatttatattgggaacaagggatgcatacatttccacgttgtatgtatctctccttctttcttcccaaaacggagcgtgttcagcaaaacgggcggtggaaacgagtccttgggaaagagaaaaaaaggaatgaatgaaactatattggcagcgggctgggagtggttttactgtggggttttgaaacgagaaagacgaagaaggacgagggaccggccagagaaaggctaggtggctcggaacaacgagagatcaaagagagcattggagacatgcaatatgcacgtacaaatactgatgcacgggcaagctgaatgaaagaagctatgaatgctatccctgacggcttgacgaggcttggacgacggaagagatcgattaggtgagatgtgcaccagaacgatagaatgaatttactttcgagcgggcatcagagtcaggctcggtgtgcatgcatgtttgagtgtgagtgttgtgatcgcttaggtaagctggtgcattgctgctgcataacacaattggatgtcactcttgatgtatgtgatcatctgctttttgtgtctgcgagggtgcgttcgtgaacatctacacacaattctcagtacacatcctatgtcttctgccaactttacactgttagatgccgatgaagaggtctgtcctcctgtccttactctatcggattttattttcaatactttttttttattttcgttgaaatcattctgatcaactacgcgacactcatgtcgccgtcttctcggggagaaattacagctcgggcaagccgataaccgtctagagttcaagagtcagtatcatgtcttgctcttttctttatggaaatggagagatctagaggtcactaacagcaatggtttctatctcggctgttgaaaattgaaaaggttacatcggtcagacatcttctagcgtgccaaatgaattcgacggacagaacagaggtgacggtagacaagataaccgatcggccggaggtttgtcttatgtgatcagcttgatatcatagtctctgtttatgtctgtctgatgttggaacaaacaaacaacctgcgtttccaaacaggtctgaattcgacagccttcaacgtagagtattatcagtatctgtttgatatagagctcaatgagcttcttcaacgatggtgcgtgtcaaagggaggcacgaaagagagagagatacacaggggatttttgtcaactagccatcgatctaatacacgtggtttacgtacattccagctggaaggcagtcgtaccgatagcgtctcaaccgacaggaaactttgtgcaggacgtgtgcgatggccggcctgatctatacggcccgttctggtcgctcaccaccttggcctttacactctacgtgttttcctcactatcatcctcgatctctgcctacctgacggatccagagattcctgccgcccaagatatcggaaagatttctctggccgctgggctggtgtactcttatgggattggcttcccggccgtcatgtgggccgtcgtcaggtggttcggcaagggtgaggttgaatggagtcttgtcgaggcctggctcgtttggggatgtgagtcccatgattagtcttttcccttgccacagatcgcgccagaacaacactgattggagaatgagagaattttccctcatttgtattttgctttgacgacagactctatgacggtattcatccctatctctttcctgtgcatcatcccggtgcccatccttcgatggatcctcgtccttgtcggagccggcacatccggttggttcctgtgagtctttcaatcccgtcttgtgttcgattgagattgagtccggcagaatgatctgaactgttgaaatctgttatcgtcggttcacgaaaccctcggcatttaggttgagaaacgtgtatccggtgttgtccgctttagattcgaaacttcctcggttactagtgattttgatcttggttctccatggagcaatcgctttgactttcaagcttgtctttttctcgtgagtgctgtcgttttctgcatctttctctctttctcttttctacctttgtgaatagtctttgagtgtttttctcattctttttataaatctggttgcttatttttcgggtgccaaacacacacatatagctactctgtcggtggcgttcaaataggaagggaaccgctagctggattgaatcctacagattaagattttggtgaacggataccatgctgattcattcttctcgcctaccagggggaaagtatctatgagggcggggagtcacatgatgttcaaataaagaatcagtgcagcatataaagctcttttcatagatgcgggcagatgaaagaggaaaaaggcctcaagcgcagaacgggaggaagcgaggaactaggaagaaacaagcaccgacccacaggcgagtgatggagggctgtacgaggcgatgcatggaatcgaaccaaaaggcgcagtcgtcgacgacgtcccggtatctatcagagagacgtctcagtctgatcgaaaataagaataacagatgggcacgagatccagatcttgtccgagacacacattctcagcgtcgagactgacaatgaaacacgaactgaatagatgagatgacgagcctggttactggccgaaggagaaaaatccgaagaatcacaaaacgtgtatgcatccaacgtaagcttacgaaacgagcgtgcacaggatttggatgagcaccaagagagagaaaatcgagtgcatattttgatcggccgatcagaacagagttttctagtgcgacattgcgtaagctcgacaacagaagttactagtttgaatcgtcagacagttgttaggcatgatcggcgcaggccgatcggagaacctttctaatcagtcaggcacgtcacagtcatctcggtcaagtcacaatcactttatccatacaatgtcggacagctattctcgagtgtaaactcccttttattcctttctcttcctacttctacccaccgtcccccactgtctattctttcttccacctatatttctccttatctgccccccttgcccttgtcatccctttgaccctggtccctggcccctagcctctgacactattttaaccggaaacgttcatggatcgacagtcgccctggtcgttatagcattcaatcaacagtttccccagctgagtaaatccacccgatcggcctcgtccgggcatcctccaagtctttgatcaatcacaccattcgccgcgccaaggtgactcgtccctcactttctgactgcacagacctcgtcgacaacgttccactcctcactcgtttttttccatctcgcctgtctgtcttctctgcaaaagaccagggatttcagaatacccatacacacccatacatccaaccactgatccttgctcaagtagtcatcatctgagtgtttcaatccattccacctcaccctagtttacaacatcaataacaacgaagacgttgacaagaacaaggacaaggacaagaatcacaggaaacaacaaggaaaacaaaaatatctgctccacccattcctcgagaatactccaaaaaaaaatgtctggctatcagaccgctcgatctgtacgtcgacccgactatctatcgctgtcggacttgactcttttgacctggctcgactgacagttgttgttggtctgtattttcaaaccgaatgccgaatgaatcagctacctactatcactaagaacgaccctttgtttggttcatccacctcggcgaacagactctgccttgggtttgacagcgagccaagaaagtccgcgccggacggacaagtaggacgaaaacgaagactgatctcgttcgaagatggagaggttagtgacatgtttttatcttctcttttcccatgtcttcttcgttcttcctctggcttctttctttctttactccctcttctttctagaatatgagctagacgttgacgacgcatatatacttcttatatattctcttctctataaaagacaatgcccaccgctaccaccacggcgtcatcctccctgtctcgtactcaaaccgagtcaacctcctatttactgagcttcccagacccatttcattccatcccattttactacgccacccctccgataaagcgtcccaatcagctgtccgacccgaccgcttcagacaccgtcgttccgaactcgttctcctctgcatcctcgaactcgtctttgtcgaacgtcagtgactttgcacctcgaacgccgaaagaaatcgtccgacaagttcgtcaggtccgtccctcgatagaaaagaaggacgacaccacagacaccgtgtccgactggctctctggcatggatggactggacgagagagaagccacggccgaaactgaatcgacgcggccgacagaacgtccgtcccatcactccgccatccaccagaccggtcggggcagaaaaggcggccgagatttctggtgaccgatgttcattgtaggcacggtcacggggtcttctttgtttctctgttcttctattcgtttttgtctttgtctcttttccttactataccttccatttttgtccatctgtcgtcacgttctgtatccctttttttccctttttttctttccatcataccaaaaaagagcaagtcatccacttatttattttcattttgcatatcttgttcattccgttggaattggccatgtacacctactttcgtttctatactctctcatttctttcccccaaagttgataccttgcttgtctcttttcgttcgtttccctttgtttgtactctggaaacccctttctctcccttctctttctcaacacatatttcatttttcgctctctgtgacccgccttcattcgttgtgttccctcgacgttgtacctgtagacgatgcatggcctatgttctttctcatatctgctttactctgttaggtgcaatcagttgaactaaggaagttagactgtcggaaaatgaaactcggcccggcccgaacttgccgagacggtaatagcgttggggtttgtcggcaaaaaaagtaccgagaaaagaggcagtaataagtgagcgcggtgtaggagataagccaggagcgaggactgactcactctttcgtgattctcatgatagaacggcgaaggaagagaaagagaaggagaagaataacagcggcaacatcagtatcaacggcaagatcaatggcatgagaaagagaaagatacagatcagatcgacagaaggccaaactgcatagattgccgataaagcaaagccattgagagagtgtacaatagggagaagtaagaaaaaaaaagtgcacagtcgattaaaatcaacccaaccgccttcggggttttatcgtcgtcaaaagcgcacacgctcttttctctctctctccttccctctctcttgcgtcctctctcacctgaccgattgcagtagtgtatcttagatcattgatcccttatccttccctatctcctctctacgatgaacacaaccagacggacgttcgccacttcaacagtcagacgattgtcatctgtgcctaaagctcaagtacctctcaactcgaatcaacaggtcgccagtcagatgtcaaaatcctcgtccgccaaaggtatctccatcgagtcaattcggtgagatttctttttcttttttctttttcctttttctttctcttttctctctgttctcctttcttttctacatcctgttcttcagatcgagtcggatcggccttgtctttcgtgttctacgtcgtcggcgttagaatccatctgggttctcgtctctctttgctcctctttcagctcgatcggtgtcaagaaaaaaagggttgagagttcgctctcttatctcattcttttcttcccatcacttttctttccctccgcttttttcttgtttcttgactctggtgtacgcttcgttgggttaagaatgcgagacgcgatgagattcaacgagtgatccgaatctaaactcgattttttttcttcttttcgtcatcctttttagacccgccgtgctcaaagtagaatacgctgtgcgaggagctgtcccccaaaaagcaacagagtacagcgaaaaactgacgtctggaaaagggaaagatctgccgttcgacaagattgttcatgccaacatcggaaaccctcagcagaccgggctggaccagaagccgatcacctggtggagacaggttcgttgctcgagcgttctatgtctctgtcatcttgatccatagctaacctgacttgtcactccatcggacccgtcatgaatagatcgccgccttgttagaatacccagcattactggaaaacccgttaagctcccagatattcccaaaagacgtgatcgaacgggcgaaagagttacaccatgacattgggtccgtcggcgcctacaccgggagtaaagggctagatagcaccaggcaacacgtcgccgcttggttggagagttcgtcgtctccttttgtctctttgttcagttgatcagaggcgcctgacgcgtaggcttttcctctcttctgttcgtctccccttcacactacagaacgagacgggttccctgcaaacttccacgacatttatctgacggccggagcatccgccggtgtggatcttatcatggatgttgctgtttgtcagggggacggtgtgctgtgagttctttccgtttggcatatcaagtcagaaagtccggttgtagaacaaacctcaagtgagcagaaagagactcaaatagaaaacgcctttgttcttgtgttcttgggtcgatctttatcttctgatcctcttatataggatccccatcccccagtacccactatacacagcgacgctcgcctcgcaggaagcagtgccgttaccctactacctcaacgaagaaaacaattggtcgtttgacaaacaatctgttctagaggccatcgagaaagcaaaagcggacggaacaacggtgaaagctgtaggtcccaacttttgtcaatgcatcgttcgaggcgccgtctacgaggagattctttttttttcccaatcttacaatctcttctctcgcccttcccttcaacaactcgtcgtcatcaaccctggaaacccgacgggtggatgcctctcgctttcggatatcaagacgatcatctcgttatgtcaccagcactccatcctcctcctcgctgacgaggtctaccaggcaaatgtgtttgatccagagaacaaaccattccattcgttcaagaaggtgctgatgagcatgacggaagacgttagatcatccgtcccgctcgtgccgtttcactcgatctcgaaaggttactctggcgaatgtggtagacgaggtggctttttcgaaatggtcaacattcccaaagacgtctccgaccagatcttcaagatgagctccgtcgcgctctgcccgccactctcaggtcagatcggtgtggactgtctcgtcagaccaccgagtacggatggagagagttatccgctttggaaggaagagaccgatggaatattaaattcattgagggaccgaagtctatttatgcgatctcggtttgataaactagaaggcgtcagctgtcaggaagccgaggtgagccccccttttctcttttttttttcttctcatactcttcatcctgcgcgtgatcattcaattctaacaactttatcttttcttgtctctgctgctctttccatcatcacc

SEQ ID NO: 3075 - DNA, 7351 bp, Xanthophyllomyces dendrorhous
aaaaaaaaagaagaaaaaggatgacaagaagaaaaaaatgaatcttactcgtagttcttcacaaaccaatcgatgctggctttcatcgcctcctcgaacggagtgaactcaaagggagcacctccattggccgtcatcagcttttggagtttctcgttggatgccttttttgaacgtttacaatacacaaaagacacaagagtcgcgtcagtttgatcagtctttgtatccgtttcggtcagatctaaaagatccatgatgatcgaaagatacttacaggctttcggaattggccatcagatttggtcgtgtcgaactatcaagccaaaaaagaggaaaacgtcggacacaatatcagcttcagtccgttccagtccaagacgaccgacttggaaatgtgagaaaagatattgaagtctttaccgagtactctccctggaagtccatgagcttgacgatagtatccgccacagtcttaatggggatctcatcgtgctcagcgactgtaatcaacaaagagattgtgagatgggcgtagatatcgctgcgggcaaggacgaattaaaaattcaaatctggcatcttaccactcaaaatgaccgggtcgatctcgttgtactccctcaacgtccagatgaacaacttggcgagatcccgagagtagatgaactgtcgaagcggcttgccggttccgtagatggtgaaaggcgtgttgttttctagaccaccaggaagggtcaagaaataagttcaaagattcgatcagcttacaggcgcaacgccatgcgaccagccaaagatcaggatgaaccgatagtcacgtactcttggccaagtagcacttgtgaatcaatccaggaataacatgcgagtcctctagatcatagttgtcgtgctctccaaagatgttggtggggatgacggaagtaaagttgtctccgaactgatcgttgtaagcactgttccatgacgacgatcggatgtccatccgttaacccatcactcggtatacgactgcagctccagaaaaatttgtctaaaaattgaacacttactggttctgaacgtcaaccagtctctttccatgagcgtaaccaaagttgctctgatggggaggaccaaggtggactttggtctcgtccaatgggtactcgactttgtcggggaacacacaggtcgacagacaagagatgagcttctggaccttgttctggtgggaagtctcgagtacattgtcgttgatcaacaagttctctcgaaggaatgtcaacttgagtcgcatgtttctgtggcgagtatatcgtcgatcgatcggccgttcagaggaagaagttgagacttagtagatccaatctaaccagatctgataggaatgattgaagttacaaagtagggctttacctgaaaagaccaccgacaagagcagccaactaaaaccccaaccaaaacagatgtcggaatatatgagggccatgctttgagtctttgtcaacatgtgaaaactatctgagaaactcacgtgaatgacatgagtaggcttgtacttctcgaagattgcagtcacagcagcggggtctctgtttagagaccatgaagcaaaaaggtagaatcggagacgtttgtcagcggtctttcgaacagttcacagtcttgcctaagcgagattccaactagagcgattcgatgatgccagaacaagtcatagagagcactcacctaagatcaccatccttgctggaaaggaagatccactcttctccttcgagcttgccatatcgacttcctacaggctcattcgcgagaacatactgaagagcctggccaacgagaccggaaccgccggtgacaagaacgatctgcttggacattagattctagactgagagagaggaaagagagaagaagaaagaaataaaagaaaaggtgaaagcaagatgccagtcggtgggagagaatgaaatgaaagttggaaacatcccgtagatggaatcgggcaactttgctgactcagccacttgccgggcgggtcatcgtgcatcccatcgggattgattcagtatcatacatgtatatatccagtaacattaggcaaagaaactcgatgcattcattctcctccttgcatggccttcttgattctcagacagcattccagcaaatgaagctcttcatccccaccctcgcataatgctttgtcacactcagccatcgcttgggccgctgatgatttcggtcgagcagggatttgaggatgagtgatgattagatcgtgcatctagacggatcacaaatcacgttcaacatgatgagcttggttccgagtagcaatcaggacgacaagcagaccgtaaagaaagaaacgcacttgggataacaccgtgtttgcactccaaccctctcgcttaactctcttgacggccttgtgaacttgttcgaaagttcccttgaaattctttccgagatagcctccgtcaacctcgactccgatagaagccagcacaaaattaacaatcccgtcaggaacgtttccagatatctcttgaactatgtgtttgaatcaaagcaggtgtatgacaataacgatcagtggcaatccaggggaagctcaaattcatctcgagacgaataaagcactcctgcttcaactgacctgactcgcgagagatcggagttggcggcgatgtggctccgtgtaggcgcgaggccgactgaagaagagtgatcgctcgacgtaaatcacctcctgatagcttgataagaagctcaatcactccgtcatccctaatcacctgttccttttcggcaatcatcctcaacctgtcttctgtgctgttgatgtcgagagctctaaatcggaactttgaacaacgagaagctagaggctcgataatcctagcgcatataaaaaaacatgacccaacgacaatcagaatcctgacagcagggtacattgatagtcaatagcagaattgactaaccgagtgacgtagttgcagaccaaacagaatcgggtgatcttggagtaagtctccatgattcgtcgaagagcggattgtgcatcttgagtcattgaatcggcctcgtccagaatgatgattttatacggagggaatgggtaggtctttccgtctctgtagatgatatgtatataacgttgatcagaaagcatgatcaacaggtatagagatctgaaacgaataactgacgaagccacagcattggtattacgaggtgtctcttttgcaaaagacttgatcttctctctaaccacagagatacctcgttcgtctgatgcattcaactcgagcactctcgtgcgaaacgagtcaggtctaagtgacgaagaccaatacaacacgatttagctcagatccatcattcaaacatacatagaaagcttacccaaaaagctgtttggacaatgctaggatagtacttgtttttccagttccaggaggaccataaaagagcatatgagggagctacatagatttgaattttgcttcagcaacctgtactgggcacatcatgttgagagaacgagatgatagaaaagccatacattggtcgacgtcagtgtcttctgaaggacagcaacgacgttttcttgactggcaacatcatctatagttttcggacgactagatatgtaagcaagtttatgaccaaaccatgataagcgtccgaaatcgatcatccgaatgtacacaaaggagaatatcacttactatcgttcaacccaagggatagactcgttcgagacaaagtgcccggtctgtttcgctgtcgaccgatcaactctcgtgacatcctttgaagcttgaggcaagaacatttttgtcgatgccattatacgatctccttgtgcgacaactgagcagggctagaaagaaaagagagagtgcaagcaagacgacgaaggatctttcggacgatgttctcaaatgagaagagcgaagttgacgcgtcagagaaacgcgtaactcacgtcgcgtaaccatgctcataaaacgcgtaaccatgatccctcgagacgcgtctactgggacgcatcttggttgaactgattttccatatcatcaacctcaatacgttatagatccatcccaggcctgctcgacaactcgatcaggaaactatgagcccatctccgtccaacgcggtagcttcgtcatccaaacgaaaggtttctggtaggtctttgcggtttttgttttatgttgtcgaaggtatcaaattcgaatgaacagatactcaaataaggtgctcatcttttcccgggtttttcttctttttgtttttcctgatactttgtttggtcgttggttctgtaattccgctttgttctttgaatgaactacgacgatttggaccatacagatgacagagcaagcagtccatgcgatgtcattgttttcagtcctgagaaaaaacctaaattcacttcctcaatcggttagtcgtttgatcctcagtcgcatgatacgtcaggatcaacaatcaaactgggatcagaatatcatttcttctgaaatttctttctccgatttgcccatcgatgcttacatcttgacgttcttgtcgttccgatctctagtcaaactgcagggcacaagattcatactttctcaacgaccagtaccatcacttctatctcatgcgacttcgtctttgaaaggtgacctcaactcaagcttcatcaattgactatcaggattcaaccaattgaaatactgacgcctctttccttttcttcttcttttctttttgtggtgaatactacagagctgctcgagtggaaagaatggcttgcgtcagcgtcggaagatgataaggctctagggatgccgtcacgattcattggattgatagtgaagctttgtcatgaaaggtctttatttgcctctcaattctttacttctcaactctttccgtattccgatgtcgcgtgtcaatatatgcttacgcgctattctacttatcataacctcttctcttgtctgaattggtgtctacgttcaatcaatcttctcatccacagcgagaagaatgtttcgtctctctctcgatccctacgcgcagagctcattccggcaggcactagcgatcacgatccgaagagtggcagcacaggtaattgatgtccaacaccatctccttcaagaccaaactcatcgcgagatctacaagaaattgaaattaacaagttcaacgggtttggcatgttctcaaaatgtagcctcagatcccttttccttcgccaaactagaactcatcattaccgcccatctaacacgcacaaactacggtctgacacccgaagacgtcgatctcgctcctgattccaaaatgcccgctgtacgtgtatcggctgttatctatattttcctaaagtctcaacatcatgcgttcttttctgacatcgtgcgcgctcaacaggggttatttgtatggcgatgggaggcaaatggccgtaaagaacaccttccagcagactcactggttcaattagaggccagatttcaagagcgcttagaggtttgtctatatatcacataagcttgttgatctatattgcaagtctgacatagatccattgtgcttttgtcttcattaggtcagagacgcttgcaagtcaatctgggacaatcttgatcaactggaaaggacccgaattctatcaggcaacccatctggaggaaacgcaaaggtatgtcatcgaaggtgttctgtagagaccggcgtacgattaatctcattccgctttatcgtagacaaaggagaaggctggaactctgatagcgaaagtggtcgagcaggtagagaccaagtcaccttcacaaagcccccgcaagaagatgaagaaactagaggtgcagctctcgtctttctatcaccctgacaacgttctagttctatactgatattatcattctttatccaacaacatgaaggatgccgagaaagaagcccagaaagaagctcagaaagcagaaaaattggcagagaaggcagcagagaaagcattgaaggtaaggcgtcttgtaataattccgatcgagtaggcaagctggtgtccttacgtttgtctcctcttcctttttgcataggatgccgagagactagctagagtcagcatttcttattcttttttgtcatcattccacactcttcttcgcaatgctggttaggaattaattcatatatatttctgaaatacaggaagcggaaaaaacaaaaaaactggcagccaaagaatcttctctccgagacaagaaagcgaaggaagatagagaggcagaggtaggctgtttattctttgtctcgaccaaacgtctagtgaaattaaattctgtcgaccaagctgatctatcttttcaccatgtcgatggaaatccacaggtgaaaaacaaacaggctgctgccctgagatctttcttcaaaaagcccgagccagtcgaaaagccacttcgacaagcaaccatccagggtgcgcatcacattttgaccaagttttcgagtcgacgtaatgggcggctgaacttgcattctatcttttcgataaagtttccgactttgaaaagacgtttttgccttttgtacagaggaaagacgtagaaatggcacccatcaataggtttaaggtggaaaaggataacatgctgaagaacgggatcgaacttagtgatagtatggacgtagatatggaatgcatgagcgctcgaggtatgtcggcgtgtcgatttaaattgttcttctttatcttctagatcttggtttaatgttcttgaaacctgtgtattcgtgaccacttactttcctctttccctcttgatcgttccaaaatttgtagaccttctgagcagctttctctccggtgtagcaccatcgcgcatacctcatcgtgttgtttatccgtccagcgccatcaaaactggagcggtgaaactatcggtcagagacgttgtggctcaatcacaggatgcggagatagcaggtaccggagaccctcatcagatcacagcccagttaagtaatcaaaggctcttcaagagaaagttcttgcagttcagggaagatattcgaccggcatactttggttagtctgcattttcttctgatctgagttgggttcttgctctttcctccctctcgaagacatcagctgagtggctcgtccatattttcctgtaggtacatggacccaaagctcaacacttatcggacctagaacgccgttcgctcaggatatgactcactttgactactcatatgattccgggggtgactgggaagaagaggatgaggatggagaagacgttcaatctctctccggaggcagtcctagacc

SEQ ID NO: 3076 - DNA, 13009 bp, Xanthophyllomyces dendrorhous
agtctaccggaggcgcgaacggcgccgatgggacgatgtgggatacagattcgcaggatgatgatttcgatggggacgatgacgctgactccgaggacgaagatgggttctttgtttccgatgatgaagctttagggggtccagatgatgagattgcgactccggcggtggctgttgtagctacagaggacgttgagggagcaaaaagaaggaaggagaagagtacaaagttcaagaagagagagattcaaccgctcgtcccggtagttcggggtccttactttgaacaaactctcgggctgtgcccttcggatatattccaaggctatcaaatacaattcctcaatggtgtgttttgttcctcttggtcacttttatcaatataatcggccagctgcaggaaagctgactgacggtaaatttcgttcaaactgatctgatatgaaaatgactttcaaccgacagacaccccccttggcttggatccgttcacttatgtggccgagtctattcgcccggctgctcgtgtgcaaaattcatcatccgctgccaatggtttccaaaattccctcaccaacggctcatctcatctcaatggcacaatgcctcctccgtctaccacttcctctaccactaacgccgccaaccaaacccattcatcagcgagtttgaaaacaaaacagaaaccaaagctgacgacacatccgttatcggtgtcgcccatagatggaaattcttcctcagtacagaacctaactgcccgaccacgcgcgccgaagacgccattcccgacccaatacttggcacaatttgtagagattgtagctcgctcgagcaaacctcaatttttgttgttggcagatcttcaggaggctttcaagtcggctgggatcacgaaagtccaactaacggaggaactgaagaagagagcgaaacgagttggaaagacggatggaagtccttggaaagtggtcgatgaggcctgggttagttctctatagtcatttggtccttaggagatatgttgattattacctctgatcgctttctctttattctttcggtgatgatgatgatgatgatggtgatgatggtggtcagatcgaagcaggtttaccgataccctcgtagggaaaattaacgcatgtctctttgaaacctctctccaactatcttcttctcttcacgtttgtctgttggtcgattgccctgtcaaaaaggtcgatatcctgatcgccatttcgatcctccttttgcatccttcgcttcctcccaatagtccctcctttcctttgcctgatctcttggctttgccctgttttccttttttttccatttcttctgtgaatttttaaagtgaacagtatatatgtatatgtacaatccgagcctatcatccaggccgactggcaacatgaaagattttgatccaggcgtcgcttgcagggttcgataataaccgatatgataaatttttatatgtttttttttacacaagagatgcgaccaagtcaaacgtttgaaacccttataacccaaaaatgaagaagcaggcgagcgaaaagaagaaaagaaaaagggaagcaaaccctaaagcccaaataaaacgaaacaaaacaacagcaaaaaagagatactgaaaagcaaaaacggaacggactagcgaacggtaaacgatggacgattttgatagcgagaccgaatccacaacgaacctgagcaacctgagcatcttagttttggttaaactgatataagacgacaccgaaaatagacataacgaagtaaaggagaagaaagaagagtggcgagacgttccagttttgggtggattagtatccgacaacaccgacgctgaaacccttgtagctgaacatgatcaggcaaacgggggatcaaagcgcaaaaagggacatcaggatttgcggttgatggaaagagatctcaaacgcgaacaaggaaagacgagaagaagaagacatacaaggcgtgctgctcggtcgagggagcccactcggattcgtgaccaccgaagaaggtctgtacagaggggcgtatatcaatctagtaagttttccaaatttctattggcttgctatggaccccaaagtgagaagaagaaaggagggacagtacgtacagagacaaaggttcccttgaacccggcggctgagttttctctgatttcgaggttgtaagcgctgatgacttcctggtcgtcgacgatgagcttgataaacccgttgttctgaccgacatcgttcagtcggtagtgttgctgaacggtctgccatcgacctgtaggcacagcatgagaagaacacaatgatagacttagcacgctttaaatttttacggagaaaatccaaagagaaggacaggctgaacgaaccggttgaccagtatccgtttcctcgaccgaagcttagaccgtaagcgtcgttgttgcaaacggcgccggatccagaagcctcgcacgaggccttgttggcgtccgtcatgggaaggtaggtgtatacctccatagcgctgtgagtttgtcgaggaaagtgtgaaggtcagcccaacatgtttcatcagaatctgacggtgagtacacttgttgggagagaaactgacccattggctcgccacatgagtcggatagtgtagcaggtatctattagggttcggtataatggatgtcagcagctgcggtaagaatgtagactaatgcgtatgaagagaattgagcgagaaacgaacctcgaccaacttggcttccacccgagcaagtgtagaatccggaggatccaccgtacattccaatcctaccagagaacccgggaagacacgttagtagagggaaacgaagagaaaaaaaacgtattcagccaatcaagctgagaagacgctcacatctttcctccgagaacccaatcgaatccgggggcaaagtagactttataggtcaggacgatttcctttgcgttcttgatgtcgtcgctccagtttgtgtagtagctcattccagacgcactggcagccacaccagccttgtaggtgaccgccagagcctgggaaccgtctggtgtcctcttggtgattgaccctccagctttgccgaccgaagcctggagggcgttcgctagggtaactttcgagagcgaggaggatccagaggtggtcgttctgaagccggagaggtagttgaagctggtagctcggccatcaagatccgaaacttctactggagcggcgagcgcaccaagaggagaaagtaaggtagcgagaaggaggagtgacttttgaacgagcatctgagtaggagagggtcggtatctttctggaggatattcgatgaggaacgaaagagggggaagaaatcgagggaaagcaaagagagtgggtgtattttacagagaaagaaggaaagagaggagagatttgtctcgcccatccgatcattttgaacgttctcgttgagttttccgtctcagacattcattgcgaccccgaaaggcgcgcactgtttcatcggagggacattctcttctatcccgtgcacgtttcgacaccgaacctaacgatttcgggtagtaggtgttcggcctcttttatttggtattctgagtttgccttcttccttaggaaacgtgtcttggggtgtgagcttgagtgcacccgcgtgcgctaagggtacgggtgtgcgccatatatgtgtgttttggtaccgaatgtttgtcctattcattctgttgtttactcagaatataactggaaggagccatttgttcgaacgatgttcagcctgcgaggaaggcggaggcgggcaagctcaggcaccggggcaccgggactccaggactccgacagaaataagcactgtcggcgtttagtacggtctggaacttgatattgttgggtcagggactaacccgggccgatgaactttaccccgccatcccacgtgtaattggttggttttaattatgttgctagtcaagtgaccggaagaacgtgaagcttcatttataccgtatagaataaggacgacccgctttatatctgctctttcacttgagaccagtctgatgggaataacgtgatatcataacggagtaagacaggaaaagaatgaatcagaaagaagaggaagaaacaagcagcactgctgtctgtattcaaagaaacaaaaagaacgccgtccttcaaggacagacacaactcgactttacaaaaatcgaggatcaagaaaataaaagaatcggtagagcgcagactctgtcttatcaagtgatgtgatcagaagaggtatagaaagagaaaagagaaaaggtttcgtgaatttcctcagatctatgcgatgactccgacgctgaagtccttgtagctgttggaattgtagatagaacagggtcagaacgatgcttccaccgatacacacatgaaatgcacttactatgcatgctggtccgaagaaggagcatactgagacccgctaccgccaaagaatgtctgttcataattaatttcatcaaataaagtaacggtctcagcacaggtgattgagagacaaggcagtgtaggttttgcaaaatcgatacttacagaaacgaacatcccttggaagaaaggatcgctcgtcgctcggagctccacattctcagcgtcaatcgtctgaactccgttgacaacgagcttcatgaatccattggcagatccaatatcgttcagtttgacatggatctgaacagtctgccagctccctaaaacaatcatcatccagttcaagattttagaaaggaaccagttatcagagtcagcatcatgttgatcaactcagtttaggtggtcgtcttcagcttgccaacaacaccatcatgaaagaggcacgaaccggtactccagtatccgtttcctcgaccgaagcttagaccataatcatcatttgtgcacaccgagccggatccagaagcctcgcacgcggccttattcgcgtccgtcttgggaaggtatgtgtagatctccatagcacttttgatgagcaaaaacagaacagaaggtcctccacaaccatcaatatgaacgttcaaacgatgtagcattttcattctcttgatgagacttacccattggtcctccacatcaatcgaattgagttacagatgtctatagaccgatttaaccagacgagagataaattagttccagggccgaccacgacagacctttcttgagagaaaagaacctaaaacatacctctgttttcctgagaacctccggagcatccatagattccatcttgacctccgtaggaaccgaccatctttccaccttgaacccactggaaaccatctgtaaagtaaacagaataaccgagcacgatctctgttgcgtaacggatagaatcatcccactttgtatagtaactgatcccaccggaactaccgtactttccacccagataagttacagctagtgctgtcgatccatccggggaggatgtgttaattgtaccaatctttcccttggaagccttgatggccgtgttgagagacacgctcgtcaggccagaagtcgaggtcgaagagcacgtccatccagacgtgaacgagtacgagctcgcagatgacacagccgatagagtaacagccttggccgtagaagcagaagcagaagcagaagtagtataagagcttgattgagtattgatggtagaagaggcggcagtagctgtagtagcggcagccatgggggtcgtcgtggccgaagcagcgttcacggtcgaagatggctggacggcagaagacgcggctgacgaacatactttccgctttgagactctcttcctcttccgctcgaggtgcttttcccgcctgaccacatcttctttagttacgtagttctcgataacaaagggttgagctgcccgcacagcttcgttagacttggaagcctccagggctctcctagggtgtttgtgctgacggaacagtccgccatgctggaatgatgaagccatgatcatcactggaagtgataaggccagaagcgagtttgacacgagcatttttagaattgaggtatatgtgagaaagagaggggggataggaaggagtgaatgaagggatgacaatcaaccaggatcgtctgaggggagagagggatgggtggacgggtgagaaagagagagaagggagaaagaaagaaagacaacaatgacggaaacctaatcctcacgcagtcagccgtcatcagttttgttgaacgatcgtcttaatattctctccccccttgcgagtctttctctcccatgccgttctcgctcacgatatagccggtttacactgttgtgccgaggagatagttattccggaaaacatgtatcatggcatcaaagttttgctccgaactccggccttgctctcctagcctccctcttcagtcgttctctcatttccaaccaccatgcgacccctatttctttcccttcgtccccaagaccatcactgattccgttccaaactacttcgaccatctcttcccgtcgagatgtctgaggtagagtgcgcgagaagattatgtcctctgcttgagccagaaactttgtcaagagtgggaacggtatcgtaggcaagagagagagatatactagcggaagcatttggtcatcttctgaaagactcgctcgatcggtagggatatccgggaaagaattgacaatcttgtaaaggcaaacttccacgactcgagaagattctgaggaggctcggttaaagagtatggtgaacgcatgttggacttgttcggtagagagacgcttggcgagcgcattcttatcagacagaagaacagagagcacaacgtatagcacatgtcaacacgatattgacacccgcttgacgacagaagagtgaacgaaacaatggaagaaagcggacttactcttatcaggcagtcacagtatttcagtatcagttcctccgacccggacgatatggcattcagatcatcatggtcagacgaccgtggaaagcgtagtcttccagagaagatagcaagcatcaccgaatgcgaagattcaaacacatccttggatgtgtcatcctccaaatatctggctcgggatggacatgaggaaaccccaagatgaaattgtgattcagcaccctatatcgacatccaaacctgaagtccagacacttacggataaacgttgggcaggatgagttctctcaatatctcatccttgaacacatctaccccaacgaattgttctacaaccaacaaaagataattgatccgagaaacctcgcctatctcgcccttccggacaccctcgcgcagagagcgtatcattgaagtcctttgctccatcgaccacagcggtccacacgccatatcaatcagaccccaccagacatttccaagtccaacatgggtagaaacccctccaagcttgtcgatcagagatgcggatgtttgaaacgtcatcaacatgtttttagacagcgtaaatgatgccaaggaaggaagagaggatgaagcgataaggtccagcaaggattcgtgtattggaagtataagcgaggtgagcccctcttgatatttctggttgatagctaagtatcgaacaaaattccatagagatgcgttaacgagatctttgttttcttcacaaaggcgactacgtaaatatacaaacctgttgtcgagtcaaccagcgactccggagatattgataatgcgtattcttgtaggcgttcgcttagccgaacaatctgtcgggtgttcacagacgatttttctgaaagagacagttcaaaagtgctgatgactatccggatcagagtcaccaggtctaagtattcgagggggtcctcgacatcgagagaagaaggaaagagatctattattgtggtgaggatatccttccgataataagagagtaatggagttgacgtcagtaaaagtgatgaaaaagccagttagagtggaacctggcttacattcgtctctaaggcagcgatagatgtcaaatcgatctgaggtaacacagatgctgccaggatcaccacaggaggcagacgatctgatgacaaagaagatccttttagccataagagcagcgcagtacctatatacacgacacaaaaagacacgcataccagaggccttccgctttccaagggccttcataccggttttgagcttctgaaacccaagctcgattgcgaccaaaacctcgacctcgacctctcttctcaaccgggcatcctgttgctcaaggcatagtccctcccatagaccaatcagagcagctagtttggaggctgaacttgctgtaatatcgctggaccatatattacagagcgttcttgcccattcggtcatgctctgattagaggagtttgaccaaagattgaaccatccgcgtgaaggtggagggagagtgagcctgagagagacagccgtctgaatagcctgacggagaagactgagattagttagagaatgatccggttggatgatatctttagcccaaggaacgagatcctgtgaggcagctgttgccagttggtgaggaagagtagatagtattgccatggatcgaatgtaggtagtgttgagcaagaagtatgcatgtgtgtatgagacagaaggtgatgaccgggttttgagactttacggcaacggcgaatagccggccgcaagatcacgtgatcttaagatgtcgggcagaactctcaacccaaaccgtcattcttcttcagagtcccatcaaccatgtttactcctaaagctcgtctagctcctttggcaccctctgagtctgatagcccttggacaagaaaactaaagtcttctcagctatccatagttcaatctgcgttcgatcaggccgttcaggacgagacagcgagccatcaatcgatatgtatgttgctcttaaacgcctgtcaattggcctcatgaaggactgatcgtataacttgtccggatggtaccatacgtttctgtgatagaccaacacttcaaatctaagctccctgagagtctcatactggatgatgatgtgaatctcatggctttgacggatctttgcgacgtactggcgttgcagcctactacaataacagatagcgcgcaagtccgaagtctattatctccagcgcgtcgtttttcgtatcaggcacactaacagtttgcgtcatggtcgaacatacctctagaattctttctcgaattcaagatttggttcagcaaggagagtctctgaatgaagcgctcctttgcgctcaaaaagctcagtccatctcacagaaggaaggtaagagtttaacagcacttaaacagtcgttggtacagtaagtgttatcaagcacctgtcctagtttttgcgaaaattgagttcatgtcatcaactacccttacacacacatgtgctttgaaactctagcctcgatcaataccttgcttcgacgcattcagccacaccatcaacaagtgcctctcaggaggctgctatgatagacttaaaatgcaagcaatatgaagaggagaaagtcagtttttcagttctctccttctcttacttatccctgcatacctttcactccaaaataaagattctttttgaacgagtttgtttctgcctcctcttcaaacaggataaattgctttttagaacacaatccgactcttctcttagtatatccaatctcttaaccctaacacaaactctggaaagtgtgagggccgacaaacttgctttaagggaaaacttggcaaagttcaaagacttgcccgccgtgcgcttctctttgtctagcctatctttgtcatacgagatctgcacgtgtggctaaccttttcttcatgatataccgttggattttgatggctacaggacctcgatctagctgctttacaggttgaagaaggacgacgcgaattagtgcgtcccgttcggccaaatacatatttcctgtccttcctttaccacatcacactacatactcaatctcttctttaaccgtcaatttgtgatgtgacaggccaagctagaaagtcttcgggacgaaatgaaagctcagactcgaaagctcaggatctaaattcaacctgtagttttggacgacgcatcttaccgaatgatacgtcaaacagactgcttgtcggtcaacaagcaacggtggagactctaaaaagttaacctctcgatccataggttcccgtcggagccgtttggttttagacagaggatttttaaggttgcgagattatgttcacgagagtgctctccacacacatatgcgtcctaagtaaactctctagccttctcagtcaagtcctattcaatcagacaaaactcctgtaatcgatacgagggtagtttattttatatggtgtaaagagaacagaagggtcatagtcgtgatatcaaattatgtcaatagaaatgcctcatctacggctctccttcaggtctatagcttgagcgtaatgtcctgagcttatactcgcttcttcccttccccaatcttcttaccagtacccagagccttctttcgctgggagatcatgtatgtgtagagagcgtagagagctgattgagatcacacgaaagagtcaaggtttcgatacagtagagagtgaaccaggtcagaacagagcagaacagaacagaacagaacagaacagaagaaagttgatggaagctgaaaactcacaaggaggccagactaaaagcaatccacctcgaacgagatccatcatatcccagccttgaccgcccatcttcgtagcccaaaatccaacagaagaagcagcctgacccaaaccaagggttttgaacacctgtcgcacgtgaggtccaacgataggcaagttgacagcaggaggcagcaccgagtaagccaagtagaactcagatccagcgccgaggggataaagaacatagaacaaagtgtatctgcaaaacgcgaaagtgaaaatgaaagatgagcgcatataggcaattgatgcgattaaataaaagtcactaaccgtagccagaggagggggtacgattcaataccgagaagagagaaagcgtagaacagatatcggacgatctcagcgcacgaccaggcaaataccattgtagtgtacacggacgacgtccgagccttcgtcagacagagtgatagtaaagagtgagtcagacaaacagacgtcgagaaaggggttcaaaccatacaatctgacagtggcagacatcaaagaaatgaggaaggacacttacagactcaaattgctcaacaacagcccagacactccaaagcctgctcgccacctgactgatcgtcgtcccaacagggctccttacccagcccaaggccgaatgaacgacctcgaggactgcacaggtctgcacaactgcagtaagtgttccgatggacgcataagacccctgtagtcgactcttgactatctcggcagatcgctgtgtcttggaagcgcttgtctgagccgaggcaagcgacaaataggcacgaagcttggatagggcagtcgtaaccggggaggtcgactgagaaggatgatggatctcagtagaagatacatgttgaacgatgaggacaaggatggagagccaagctgcagcggacgcaaggttataggcaacgagatagtacttgacgataggagattgagctcgagctaaagccatggtcgacgagaaggcagataataagatgaaagggaccatccaaaaggacatcagcttcgggtggtatcgacaatacaagtcaatgaacggccaaaggataacaagaactaacctttgttggatccagctgtctgttttctcctatcagcagtatctttcacactgtccttctcgatgatgcgagccatgaggagcgaatgttagatgggggtgatggttaaagagtcgaatgagatgatgaccgttttgaaacaagtggggattttaactggctaacttcagttacataaaacgactcctactaccttcatcatcactcgaagcacatcagcaggcactcatccttgacatctcttctttcagccatctacatcgaatacattcagcattgtattctgggcaaagtctcgtgcgtatatagttgcatgtaaatcgttagccggagctcaacgaagacacccgtaggcagtaattaattctgttattaacaacgccgctattcagatccttctctcgacttatctccaatggctctcaaacgattgcgctgctttgattgtgcttctttgcggcctgctactcgcaagttctctgcatcttcctatacatcgtatactccttctccgcccacaccagcctttccgtactccgcacccgttccccatcgggccgtcatccgagttgcaggcaaggacgctaccaagtttctgaatggattggcggccgttaagattcccgaaacgatcgagggaagccggtcattctatggaagcttcctgcatgctcaggtaagtcttccatgctgtttcgtttttcttctgattctcttactaatcacacatcatggcttttcttgatgaatagggcaggatacttcatgatacattcatccacctgtgtcctacctcgaatgctttcttgatcgagtacgacgttcgatcacccacatcatttctagagtctatcaagaagtttgttcttcgttcgaaagtgggcctgaaagatgttagttcagagtgggatgtctgggcagcttggggccaccaagatgctctggagcgagccaaaggaggtcagagagcttggaaatggggaaacggagctagcgcggcgttgaactgggagactgagccggaacgattgagtgatcctagcgagaatgagacgggtggatgggacttaagagccccaggaatgggttggagaggtttagttaagaaaggaaaaacccgtgagtcctttgctcatcgacgaacttttcatcagtctgatttcacaaccttcaaatgattaatttttctcatgtggcac

SEQ ID NO: 3077 - DNA, 6724 bp, Xanthophyllomyces dendrorhous
gcctctttggctgagacggggtcgagttgtcaagcaacagatgcgtatacccttcatagaatcatgagaggtgttccagaaggagtcgatgatctcgttcccatgtcatcattaccttcggaatcatgcctagattttatgggaggaggttcgttacaagtctttgcgagactcatctcgtttagtctattatcatggttgaaatctgaacatctgttgtcctttttccttctttttctattttcttttcaaaaccgtagtggacttcagaaaaggatgttatgttggacaagagctgactgtccgaacgtaccataccggtgtaattcgaaagagaatcatgcctgtacagctgttccctttagacaaatcgtacgaggttgactgttctcaagccatatttctcggacttctttcgtgtctggtgggccctatgagagaaaaagctgactcccaatcaaaaccttgcgaccccccttattcaggcctccctctgacctaacacctctgccaggaagtttcccccatcctcttcctacagcacttgatattcggctcaacagccttcctacctcggacacaccggatacgaaaccgtcacgaggtcgatcgtctggtcgactactctctaatgttcagggtattggtctggcgctgcttcgtcttgagcaggtccagactgtctggcgaggagagggctcaatgagtgttgtcgattccgaagggaatacatttggcgtcaagcctttcaaggtggactggtggccggtagagaaccccgaggaagggcaagaagtcaagagaagcgtttgaatgtggattatcagagatttctggcttgagagaaggaaatcattatatcaaacgactcttctcagtccgaatcttctatgatcttatattaaacgcccaattgatccatcacagcttgtcgcaccctgcgttcgtattcctgagcgcggatgaaaacacgtgtacatacgtatttggaaagtggtacattgtcagttgataagaaacaacatcttgggacttgacggatctaatttcagggtctagacatacagccttgttatctcgataaagtttgcagcagtcaatgttggctccagattcgacgttgggttctagatcatacgttcagattcagattagcgccttgtgccgcagataataatcaactggatatagaaggaaggcgtctaacctgctagcattgagatgactgaaagaagaaccttctccacgctctatgtagaggttatatcgcaggcgaatcagtgtgtgtttgaattgattacgaaaagatcgagacacacctgaatcggactccatctctctgaactgctctcatagccgtgaggatcctctccaggactatgcaagatggagatgcacacttctccattttcataaactgataacgtgacagaaatacaagacagagtgtcagaggacaagaagtaaatgctgtacaagcagtgcagaaacccaccgtttggatgtaagataggaggatcaaacttcatcttgaacggattcagcggatagtccggtggcttgtaagagtttcatttgcacataaagagaaacaaccaataaatcgatgcatcgatttcatgagttaaatatatcattctctgctatcatatagacaattagcgagatcttggtttaggagagcaatgaagcgggcctacaaagctaagcctagcaacaaagagacctccctcgtaaggcgtatcctctggtccttgtataagcgcctcccattcaaacatgtttgactgagtagggtcaagagcaggagatagagattgatatcaaggacaattagatcagtaagcgggcaatccaaactttgacaagcacaagacatacctcggtgattggacctgatcacatgagcgatgtcgccagaccaggagaaatgccacatggtgatcagcaaatcaagctcaaaatcatcgatagaggataggctgatatgagctactgtattacctgcggtgaagagaccttcgggtgcgcctggaagggacaatcgtacgcaacaagacaaagaagatagcatcgtcaatatcagaataacttcctggaggcgagaattagatgcgtgtaccaacccgaggaagtaagctgtttgtactctgtcatcagcctcctggctgcagtagaagattgtgctttcccgatcatatgcaatatctatatccgatgtatgagtttgatggaatgtggtatgatgtaccgatgatggacggacgactgatgtgttgtccggattgctgagaacatggtcacgtgactttatcgggggtaaccgcctggacttcttattttttctcaagttgttcgtggccgtcaagtttcgattctccgaccaacccaaccccactccccacgcatcctcccctccttcgcagactttagccttttactgcgaggtttaacatctaaaatggccacctccactccttctaccgttcccgtcacttctcagaatgacatcggtctcggatcggtcgttgttctgaaccagtatcaagaggatccttcaaacacgaaagctcaggatgttgacggcaagaccgacgcttacgtctcgtcctccaagactgaagtgaaggacgagcctgctgatgagcaagttgctcggcctaaactcgtgtacaattcttttggagctttctctcggagcttggtaggtttcatctctatctttggcgagcatgagcactcttagatcggggttccttatattcaacctctgtttccatttccacaaggtctctcgactccgttcggtcttcactcttcgattcacgttaagtctgcttgctggacaggtcatctcttggtgcagtatgtgccacattatgtatatcatccgaaccataaatcttttggtcgtggatctcaatcggcctttttactttgtctacccagttacatcaaccaaccttcttactaccaagctcgtcaaacggaactttgctattcctactacccagacatccttcttgtaagtatgccagtcttggtgggaagacttacattgcgcatattctcacacgggtttcctctcggttcatgcttctaaggtatttcgttctctttgtagtctacaccccttacacgatttatcgatacggagtaaagggctggttcactcttttgtataaagacggatggaagtgagtctggaagtttcttcattctgaatttcaaagagaagaatctgacatttcttctcaatgtgttcatcagatatgccctactcggtgcttgtgatatggagggagtacgtcagctgttgtgttctctaaaaatagagaccgccgcgaataatcacttacaatcaacgtctttagaactttttggtagtcaaggcatatcaatacaccaatctcttgtcttgcatgcttctcgatgcttgggtgagccttgcttcagcatcattcaaatcatatgcgcttctgttcttgaatgacctgctgatagagaatcaaaaccaaaacgaaatttgtaggccattcctgtctgcatgttctttacctttgttttcatgaaaactcgattcaggtcagcgattccatcttgttgagttactctgatctcttttctcactcgagtctcattattgtaaacagatgggcacaaattattggaatcttcgtctgtatcgttgggcttggacttttggttgcttccgaccaaattaccgacaaggactacaaggcgctgaacatggccctaggagacggatatatgatagtcggtgccacactttatggctttaccaatggttagtcgtatagcaaatccttctgataggctgatacttcacgcacagaactatcagctgactgcataatctgaatattcagctcttgaggagtttcttgttcgaaagcggccgttgtacgaggttgtcgggcaacttggaatgtggggaatgatttggaacgccgtccaatgctctattctcgaacggcatttgtggttcgagactacgtgggatggagccaatattggcttcctcttcctctacacgttctcactattcatcctgtacacgttggctcctctgcttgtgagtatctggcatttggtcaacctagatagaggttcgatgacaacgaatactgatgtgtttcgtgttcttgatgttccgtttcgctagtaccgatcttcgtcttctgtgtactagtacgtttcatcaagcatgactgttggctattctgctgattcagattactaatctaatgttctcgatataaaccaaacagcaacttatcgctgcgtaagggtttgatctcatctgacaaagtggctatgttcagggtgctaacctttgtctcaacttgcagttacttctgatttctacggactccttattggattatctttgtactcttaccacccctattggttgtactttgtcgctgtaagctccgtatcctgacttctccttcctagctgtgtttgtaattctcaactcgcccggcttcttttctttatttagttcgtcgttgtcatcgttggtctaatcatttacttctggacgagcactccggccgagcagggacaactggatgtcactcgacccgactacgtgaaccaggtcttttcgcccgagggtgccagggtcgctggattcgctcccaaaggagatcttcgaaacgatcaagtctagaaaccctcttgtctaatttatcagatctctaacttgggagcctacccgaccttgtctatacatcatggtctccttctcgctcagctgttgctttaccttccagtttttcctctccttaaatatatatacaaacatcattgtctcatctatcttcctctaatctctctcggatgatatctctgtgatgaaatgctattcagtatcttgcgacacaaacacacggttgccatcgaggtggtgtgcagcaacaccgtccgcttcggccgtgaggagtggtcgcccgagaaatccgaaacagtcacgtgatctcgacgcacggacctcgtttcctctttgttcttgcctcgccttttccctctttgccttttcacctctcgctcatcacccagcactcaccactgtcgtccatctgtcctctttcgccatgatctctgtctctctcgtcggacgaagggctatccctcagttggctcgatctccttgtacgttttttgtgttcccgatccctcgtggacaaggggaaagacagagaatctctagacgagattatgtccaagcgagccaatcacatagagctgatattgaccctctggatttctttttccctatgttccttgctcttgtcttggatgtccgtgtcctttgtgtttatcctatcctgttgtatgccttacagactttagagcccttcctgctctttctttccggtaagtgcttttttcccttgcttcttctctagtttcactttgaagcgtagatattttccttcatcataaaggagggatcgagtgaactttttcacctggaaaagaatcatcatcagcagatcttggccgacacttttcattcacaacatatcgaggaatcccttttgactcgattgtatctacctttcctgtctcacgtatactgtattatatatagagctctttcctccactcctcgggcaaaggccgctgtggctcctatcgagcgactctctatcaaggagaacgaggctttgctcaacaaccagcgactcgtccgaccgagctcgccccacttcacgatctaccagcctcagatcacctggttggcatcgattgctaaccgagtcaccgggtgtgctctttctggtcgtaagtcgtgttcttatcaaattagacagagctcagcctcttatgtcttggttcttaatcaatcgcttatcaccttttttttcaaaatcaatccgggtctttggttgtttgtgatatgagccagtcctctatgtcggagctatcacttacattttccacccctaccttccctgggctgattctgctcaccttatcgatctcgtttccagtacgtagcttggtgttcttgagcaacgattgaaaaccgagctcaaacgtgtctaatccttgttttcgattgctgtagtcctccccagttggttcaagtactcttgcaagtttatcctcgccgttcctttcaccttccactccttgaacggaatcagacatttgctttgggataccggattttgtacgttgctctctgtgttctgttccagaaaccctattcgacaagaatcgctgacatgcttcttgcacgaatacttttgtttgcccatttgtttgcgatatgtcagtcctcggcatcaagcaggtgaacatgggaggttgggtcgtcgttgggtcttcccttatctctggtctcgctctggccatgtggtgatttgagggaacttttgatctctctttctctcttcttttttgatatcttagctttctccccgtccccctatatattctcaaccgcattatttcttccccccccttttttttcttttccttctttccgaccttttctttccggaatgaatatgtatttcaaagaaacaaagaaaaacctcgggcgagagagaaaaatcgtgctgttgtccatcgacaatcgacaaacagaaatctggaaaggacgtggtaggttttggatgaacgaaaacccataattatttcaagagattcacattcctctttatccaaaaaaaaaaaaaaaaaa

SEQ ID NO: 3078 - DNA, 11377 bp, Xanthophyllomyces dendrorhous
tctccgctccttccaaaagaaatcatcttcctcatttccttagacgaggcttaaaataccgggacaatggaatatcggttttatcaggttttttgaagagcaagggattgggggcaggattaagaatgacagtttcttttcttttcttcagagctctcgtgatcgagcgaaaggagagatctcggattcttctctggtgagatgaccgtttcgctgggagtggtgtcggtgcggagtatgatggttgggtctttcagggcgagaggtagattggatgaggctttaggtcggacggacggacggacggaaacggacaaacaacgggtttgggatcggttagctcagcgaagcggaaaaggttggacaagagatgtgaagaggatacatactcagagttgagcttgtagtcgacaacggttgatggtggtagatttagtatacgatagatagtttctctgtgattttttttgtaaagttagtcggagacaaatatcaaaattgagctccatcttctattaagaattcgaaggggaacaggtataagagagaacgattcatactttactctggcccctccatcggtatgactcttctccgtccaaacgctgatgacgtcctctccagttcggacgctcagaacgacaccgaccacgccatcttcctcttcgaactgatcacctacggaggcaaggacgagatcttcccaaagtctatcggccaagccttttcggagtcggagggtgaattttgcgcctttggggacttcttcccagataggaagtcttatggatgaggcaaacaggaggacatcggtcactggaggaagggacgaaggagggtttaggtgagagtatatagtccagaaagactcaatctgtgaagagcagagtaagggtaacaatcgttagtaatccttgagacataaccggaaaagaagaggagggcttgggactgacagatgcgaagcctccaattttctttatactgtcctcgtattgggctgccgttgtgatcttggctccaggctgacgatgagtgtaccagaacaaccagctgtttggagacaagatgaggttgtttttgggagcaagcaaaaaaagatacaagaattttttagtttaaatttaatattcattttggtgtgtatgtagcgaacaaagacgacacattcaatgcatttgaacagtcccaagggagaaaccaaatcacaagagacagaagggaacagagtatagacaagacagaagaagaggagacaagggaacgaacctgatccgacaaggatgcttagaatccttacttccagcagccgacccattgttcaccccactcaacacagactgggtctctgcagacgacattgagagtgagagcgttcgtttcccgctagacgccggagctttcgacgaggacgaggacgaggaagtattggttccgttggttcttgaggacatggttggcttttagtttatttatcgagtgaaattcagattgagcgaacggaagggacgacctggtttgcttctgggaaagggtaagaacgaagtatgcgtgtgtatatccggttaggttgatgaatgtttaaacaagcaggactgctgaaagaattttcttcttttttgacgtgcaacaggatgcgtctctggttttgatgtgcgagttctggtagtaaaatatgtgatccagtcctcaggtgacacgtttctcgagcagacgatacgaggcgaaggacgatggctgatgcaacttaagaggatagtcgaggcttgtgggagacgaggttgtttcttagaaggaggatgggatttcatctgggcagaagaaaaatcgttggcaatggcgagagtctttctatgttacgtaagcgtgtctctcttcgtcccaaccatacacaacaccttcgttgtcgctcaatgagttgcttgctttagataaggtttcaacgcctatactactcgtacatcaaccccagagtgtccttctctcttccacttagtatttccggcggctgggcgacctggacctttctctgtctcgaccactgttttaggaggaaacatatcaaagtaaaccgttttgacaagtcagcatttcattgtgtcaaggaaaagcaaagtgagatatcatgaaaggaaaaccccagacacttactcatagctcctcttgggtgctctgtcgtcatcgtagcctccccttctgtcatcgtatcctctcttacgatctctatcatcataacctccggagccagcttcgggcgccctcgacgaagcgtatcggtctcggctctctcgactttggtatccgccaggaggtcggtcgtatccaccaccggcggacgaaggcggaccggcgggagcgggatgagacattgatgcaggtgcagttgcaggggcatgagcggtcgggttcgatcgcttgcgctgtcgctcttcgttgatcttgacgagaagctctcggagctctttgtatcccagatgcatctgtcgagtgtgtatacgaccagatgagccgagagcttcaagaaaccctcaaaaagagagaagaacaaggtttcgaacatacctttccaccgaagtgatctgctaaacgacgatcggaatccaaaatactcagataagcaccgcaaacctcacatactcgaagcttctggtgaccggatgctccagaagtctcggcaagttgttgaagttccctctaaagtagagcatggtaattgagagagaaaatcacgcgtcaagtttttgtagttgatgagaaggctcaacgggggaagcaaacgacatacctccttgtccgccttctcagccttgagggcatccaccgctgccaacttttgaattgattcatcgaccttacccgcctcacctaagatcaagaatcaaaggccaaacgtgtttcatgtgtgatcagcttataactctgttgacttgggaggagtggaaacgatagtcaccaagttgttcaatctctgcggttccatcttgtatcgagatctcaatctctccgatttccctcatctatatattcgagacgagacaacatgcactaatggtcaacgagttgttcagacgacacctaaggttcgcgtgctgcactgtgatgcatcaaaccgcatccacagaccggatgatagtcgagcgaatggaacagaacaaggaatgaatactcaccaaagcggtcgtctttgcgttctcttcaggcgtcttctccaatcgcttctgagaagtatgaatccttcgatcacagtcatccacaaacatgaagatgttggactgccattcgttctcaatccgggcaatggccgcgtcgtccggtctgtccagctttgcgagctgatactcaatttgaagcttttcctgatgagctcgagggcagggtccgaggtccattttctgtgcggaagaacgatacaattatgtttcgatacagacaggagtgatatgagtaaagaagcatgtgtatgcgactagtgcaaagacggctgaagagaaagtaggagacgagagaacgaacagtgttggtgaagacgatgtgaggacacgtcccacaaaggtagttcttgcagaccttgtcgtcggtgaaatgcaaaggcacctgaatgatacccattgcctcggcacccatcatttgctatagaaacatcacgttgagttggagaatatccgaacggaataagacaagggaaagtgaaaaaagaaggtagaatagaatcagtgaaacgatgaatctagtgttggaagattgaacagaaaaacgaacctcgagcaactttcgctgagcttctgctaatcttcccatatttacttattatctgtggacgtgttatttctgatccggctgctagttctgctgctgttactactgctgatgatgttgctgctgctgctgccgtcgctgcttccgatgctgatgtcgatggctgctgctactgctgctgctgttgatgagagtgagaagggcaagatgcgaaaagtgagcgtaaccaattggcgtaaccttcggtaaccatgctcgtaaccgctcacatttgatcattcccttgcgcccgcttccattaatccatcccaaacggccagcatcatcagcattcgttcatagttctgtcgtcatgtttgagaagtaagtttgtgtttatggcgagtctggttgctctgtatggcggctaacgaattaggtgtctttgttttatcgcaggttcacaccaaaagaagatatctcgggtcagacgtccatcaaatcgtccgtccaacgatctattaggtcaaagatcctcgagcagcttcctctgctcgctgagggcgaaggatccgaggagggatctctcatggacgctctttggcccaagaaggagggtctcaccttggtcaaatgattagcactatagtttgcctcaaatattcagggcaacgtttcgtatatcatacattcacgatgtccgattgggctgattcgagaagttgacggaccatcctatcatttgtactggctgaccctgcttgttcttttttctttcccttcattccgtcatctgttttttttttcttgattgtctatgtgccatcctcccttctcggattttctaccctcaccggatcaacattagccgagatcacatctcgatatacgccctcaacggtgaacccctgttcttccagcactttgacggaccatactttcctacattgagaatactacacaagtgtaggttttgatgttcttcttcttgcgtatcctctggtacttggtcgagaaattcttcatttatatctacaatcttattctttcttcctcgcttgaaaattagatcctgagctgttgcctcatgtgaagatcgatcgaggagctattcgattcttattggccgtatgttccctcttgtcacgtaacgttaatggcgactattcgagagacattcagacctgattgacgtatacgatctctatccactcagggagccaacatgatggcccccggattaacatcgcccggtggttcgcttccccccaaggatcttgctttgcccaaagaaacacccgtggccatctttgcggagggcaaagagttcgccgtcggaatgggaacgctcgagatgggtactgaggacatcaagaaaatcaagtttgtcctcttcctctctgctctagttcgctttccttgctgttggatcacagaatgttgatatcgttctcggcttctcccttctctttcttctctccctattcttgcgccgatttatagcaagggtatcgcagtcaacagtgtgcattacctaggggatggactttggaagcaccctactttctagaaggaaggagaaaaagcttatgtttaatagcttgaaaggaagaaagagaaaagggaaagagagttatagctttttgactgtatcataaatgaaatattgattctcagagaacaaagcacccctgcatagagaaatctattcgaatctagatatcattttcatcttcgtaacaaggaaggcatactgtttttgtttcatcttgtagtctctccatctgcgttttgagactcaacaacgatgagcgggatactactcgtcgaacttgtaggtttacccatgtccatttccacatccgtcaaacttaaacgacggttttccacctctgttgttgtttttgtatccggttcctctgttccattgatacgtctatcatgggcaagaggagaagagggatggacagaattatgggatatggtcgattggttcaccaccgatggtgaggataccactgaatgagcagatttatccgttattgttgagtgtgacatcggaagatcagtcggcctggctatcggtgttgatgccggtaaagtcacaagcgaaggaaggaccaatggacaaggcaagctggtatcttgccagatcttgatgtggtagtctgtagcgatcgaggctgaagcaatcattggtttggttggatgtccctttgcagcaccaattcgcgtatacgaggtatcaagtatcagttgtcgcttttaagaaaggaaagagacaaacagatcagagagcttcgaaaggcttacagcaacagaaataacagagtcttgtttgaaaaggcaatgaagagaggttgaatagaggaaaaggttaagaaacttcggaacgacaatacttataacgcttcaacgtattcaaaggcctaccttgatgacctttgaggtccaacctctgttctctcgactgaacttcccaagcaactactctcccgtcttccgaccctccaacgacccagatttcctgcctatcttgtacattcccaccctctctaggcctgacgaggaacgtactcgggcaaccgtattgttcattcagcgcgccagaaaatgtcttgacagacttcgaggtatgaaagttccaaaatcgggtggtcgaatcgagtgaggttgaaagcagatatcggccattaggagtgaaagaaatatgtgcactgataaaagcgagttcagacagaacgttcttgttaaaactccacctcttcaaggcactccaagaagcaagcgcacctacatcgggacagactcttcatgaacgatcgtcttgagacaatggcctgtggaagtatcccacattcgacttggaaagaagttgagaacaaaaatgagaatattagagtacgattttaagacaaaattagtgacaggatcgcagggttgaaaaaaaacttacatcaaaccatcccagctacaactaaccaacatcgtaccatctcggttgaagttgacacccgatacaggatccgaatgagcgggtaggttcaagtgcggtctacctatcaaacatgttgttcgtcgatatcgtcaaagtgagaaaagacccaaagcgacatccaaggtcagacattgatcatgttccgtcgcaatggaaaccaaaaggaatgggaacgggaatagggtagatcacctgctctgacgtcccaaatccagacgcattcgtcttttcctccactagccaaaagattgccttgaggattgaaagacacacaaagcacagcgcttgtatgagcaagcagaggctcgtggattggcttgccctatagctctcgaatagacggattggcgtcgcacgaaaggcttcaaagaatcagtctgacggaaacaaccacgcgacaaagccatgacgcgcgtaagaaagaactcgagacgaacggtttgaacgccccatatgcgaaccgtcttatcgtccgaagcacttgctatcagctttgaatcgtaagagaatgcgatatcggatattcctgtgttttcgatgagttcaaggcagttaatatatgatcaaagctgcgacaacgatgaggaatataaccgacatattgacaaagtgtgcttaccttccgagtggccaacaagcacacaaagttctactcctgtctcagcatcccttgaaaatagaccatcgatgaagaaaattgcaagtgatgagatattcaattaggaaaaaacaaagctaagaaagatgagtcaatccaaccgaacatgatccagcatagaacaaaggcagaatgtcgcttggtagggaagcgaaaggctcaccaaattcgaatcaacccgtctttagcacaactcgccagacgcgacccatccggagagaattttagggctgaaagaacagaggtatgtccaagcaaggtctgtttgagcttgtaattgggtggaatggacgacgcagaggagcacaaggatgaggatatttggtctgccatcgtgtctgaagatggtcgttgatggcaagattatgaactatgatttcatccgacctgaccacggctttggcctttgggtgcacatccctgacctcacaacctttccacggatagatattcttcctgtccgatatcagccacatgttatggagtacatgtttcaagtgatgagcgctgagtctgcttgcgctcttctcttcatatatatacccgtatataaaacatagttgaatggtacctcctatttgatcagatcttcaatcaatcatgaaaaccacctgcctatcgtttcattctggtgatccattttcttcaccacacactccgtatcaagtttatcccctctatcttcacccatatcatccattagaacgagtcgtctgctcagcccttgtgtttctagaaggggatgatggatccttgggcccaccgatagatttgcttatgtaagcatcccggcccatcaagttcttacgtgtcgtcggtgtgctctatcaacattaactctagcctgtacaccctacctgctttccttccttctagatctccttattctatctctccctatccctttggtgaggatgcaaaagcgagctaggacagacgatttcgatttttcggaaacttcttccccaaagagagccaattcagaggaccctctttcggacggtgaacaaaccggtgggatatcatccaacatgagcttggtcgaccctaccctactctccagaggtagcggacttgccctcagagacttcgaagaggatgaggaagactctaagagaaccatgtctgctccttcttctactgtggcctctgggtccgggccatctagggacgagctcgctcctgcagagttgagccctgaggaaaagcttcagatgatcactagtacgtctatcttatggctcggttgctcgtcctgtaatctatgaagcatgagattgatcacaacatcttcttgctttcataacaaagacttcaagaaacagcccctcaacaaaggagacacgtggttcttgatagatcgaagggtacgttctcgactttatgccgcaacttttttcttcttctagacaatgggaaggcttgagtagaagataggggatttcttatacaaaccctttgttggttctcttgctcttcacagtggttccgacgcttttccactgccttttctagctctcagattactgaggaagaaattgagagcctcaagcctatcgataattctaggatcctggatgagaacaataagctcaagcccgacttggtggaaggaatggatgtagaaatggttccgtctacggcctgggacgctctagagacttggtttgtcctgcttggtctctctgttctcccgacctagagtagtgtgcaaattagacggaagctgaccttgaatcgaacaaaggtttgggtgtgatgtttccattccgcgacgggttatagaaggacaaggtcttggaaatgagcgattagaattctacgtgagtccgttttattaacgaccccatagattatatcttattcaattcatgttctactatatctgatggcaatgaaactactagcccccgaccgtcactgtcctcttcgtctcatctcctacaatccctcctccttccagtcctcctttcgcccaccttcgcacaccttttgagaaacccttctctgctgcagtcaagttcaaaatcttctcttctctagttgcccggtcgcactttaaactggtcccaaaagactgtcggtactggaagctaagcgccgacgtccaaatagagaatggaaagggagcgttcatcactccagatgaggttcaacagcttgagccggtcctcatcgaggatggtggagcggaaagtgagacgttggaaagcttaaacattaaggacggatctatcttggcgttggagtggaaaaacccagagatccctggcgcctcatggccattaagttctcttgtgggtcaaagcgaaggggcgctagacgttgggattagcgatcagcagcagcagcaaccgagccaagtgaccggatcgcctgccgcgtctcagggactgttctccaccccgggatacgtagctcagttggagaatgttaacagtattcctcctctagtgaaagagcccaaaggacttttaggcagtcttacgggaatcttaacgagatctaaaactgcgttgggcaacggatcgaatgagaggagcaggaagggagtaatggggttatccaatttgtgcgttggtttttcagttttgaaacgttgggctgatagagaagtaccgaactgaattaaatccgttttttcgctgcgctccaatatcattgttgtttatcagaggaaatacctgtttcatgaactcagctattcaatgcatggccaacacaaatgagctcaatcgatatttcctttgtaagctttgatttcttttgcatctatacattctcgtatgtctctcttcttacagcagtcatctgaatattcgttcttcgacgtcgattcagccgaagtctataaggatgagatcaatcgatccaatccacttggaatgaaaggacaagttgcctcttcttttggagatctggtctcccatctctatcacggtacctcctcttcgttctcccctggcgaattcaagagaactcttgctcgattcgcaccttcgttctcaggatatcaacagcatgattctcaagagtttatcacattcctcttggatggactgcacgaggatctgaacaggattatgaagaaaccgtatgtggagagtccggactggatgggaggaggagaagaggaactagcccgacttgcaatggcttgttgggaagggtacaagaagagaaacgacagtgtaattgtcgatttgttccagggccaatacaaaaggtttgtctcgagttgacatacaaagcatcttcagaatgtaagctctatactgagactgccattacgctttcaaaaaaaacattatagcacggtaaagtgtcctcaatgtgacaaggtttgtgtttgtatcttctgatcgctctacattcaaaatcttaacttgcttgcatttctcctcctttgggccataattacgcgaaaaaggtgtcggtgacgtttgatcctttcatgtacttgaccttgcctcttccagtcaagaaaaagtttgagaccagggtatactatattcctcaggatccattggcggctaggtaccaggttcgtgtagcgctccattgcgaattattaccagctggtgctcgactacgttctgaagcaagaattttatgttctctattctaggttgatatttctgttcccaaagattcaagcttcaagcatgtgaaagatctcttggctaaatggttcaatgtagatgccaaacgggtaagttcctcgttcatctttttttcatgcggtcgttgttcttaaatcttactgaccaagatgtctttactttcggattgaagcttatcactacggaactctggaaaggacaaatttataagttttggagtgatcacgaagctattagcgaagttgctttgtccgatgtaattgtcttctacgaagtaggaacaaatttgcgttcaaggcatgaggtgagtctaaagtgtctttgattctccattcgacgcccagatctgatgttcgaattgaa

SEQ ID NO: 3079 - DNA, 16724 bp, Xanthophyllomyces dendrorhous
aaaaaaaaaaaaaaaaaacattgatgcatcaaaggctatatccgtagaggatgacaactacgcagttattcctgtttttactgggtccattggtcgatgtttgtctatccttcttctgctgttccttcttgtcaatatagtatatcggtcaaagagacaggtctctgatcacaagtactcttaatagacaacagccagcccgaggcctatggcgctccattcttcatcacggtcacgagcgagcaatccaaggacgcaaaactcatcactgagttgatcattgagcaataccaacgtattcttccccatacggacgccacaaacttttggaagacggaggcagtgtctctgactagcgagcatgtggatgtggcggaaacccctgcttcgtctgctgagcaagtcgaagagcagatcacggagatcagggttgacgaggacggcgaggtcgagcagaaagacgcatccgtaccgagtcccttgaccgttcctggcactcctatggacgttacatctcctctctcacctgctgaatctgttaaagcttcttatgtggcatccgagactgtgtctccggctacgactactccggctcctcaaaaatctaaacctactcctatcttcaatgtccaagtgttctctaaccgttgggttcctagtgattctagagtcattccggacggcaagcagatgtacaacctccgagattttgacctcactacttcctcagaatcctcggacgataccaattcaatcgggcctactcagcctacatcaaccgaggcccaaccgctagtatacccaggtcagggactcatctgcatctggccatcgatggacaccgttcatcaagtgtttggttcagatgaaagcacgaacgcattcgcctcgacgtacgagactttcactgatcccagcgctgtcccagctgacccgaccacccgaggaaagaaaaaggcagttttgacgatcgacgattgcctagatgagttctcgaaggaggagacccttggagaagatgatctgtggtactgctcgaatgtcagtgcccttgaaaaacattgacgctgtgccaacagtctggaattaatccttcttgttcttgatctgtctcgaaaaaacagtgcaaagctcatcaacctgcaactaagaagctagagctttggaaggtccctgatatcctagtcgttcatctcaagcgattcggaggagcccggaaccttcgagataagattgacaatcttattgtaagtttctctcctctttcctggctttgtcgtctctgttatctgccaacgcaagttctcactctgcgatcttgtgttcgttcaataggaatttcctataaccgactttgatttggaaaaccgggttcaagaaagatcaacagctaaagtgcttgcatcgtctggtgtggatttagagtctcttggcttagagacgactgaagaacctctgctctacgacctctacggtgttgatcagcactatggtggattaggaggaggtcactatactgctgtggcaaagaatgttgaggatggtacctggtacagtttcgatgactccagggtttcttcgatcaccgagtcttctgtcgttactcctgccgcatacgtcctcttctatcgtcgaaggacgacccgacctatcggaggtaactcgcgtgttaaagcggagaaggcgcttcaagaaaaagcgatcgcctcactgaacgcttctgcggccaattctaccctgaactccgctgtgccctcgatctatggtggctctggtcgaacgtcgcctagtggagattggtatcctgggctacgaagcagcggtttggacaatatggactctatgcctggaggttttcctggttcatcttctgctccatccagccctatctcacccaactctatcaacgccgatctaggggatgatgaggatatgtttgaccgatcatctgtttcgtcacgacaggtggactactccaacacgtacaattctgaaggccaacttctttcgtacgactcggaagatgctaaaaattggagattcaactcgatcgaccgatcgaccgatagtccgcctggttgggtggctgatcaagagctggaacgacaggccgatctggacgagttcttagcatccggtaccaacccctctgccgctcttgctgcaccacaatctgcagcgttcaatgctcatccttcgccacccacatctgacgatgaggcgtctgttcctgtgtctgccgccagaccacctgtggatgaggattatgatcaactggcctcggaaaacaacagcgagggtgtctctgcctcatcctcgacgtcagctatgtcaaaagaaaattgggtggtcgttgaagacgaggcgaagccgtagggttacgtacctcagccttgattgatgcagagtagaatccattgggggttattcatcttgtcctggccggctttccgtctcttttgtctcttctgctttatctctctgcttgtttgttctatctgtgtatgatatagtatgacacaaaagaagagtcctaactctttttcaaactgaaaagcaagtatattatccaacaatcttatcccgttgatgtctctccaaatacttcaaattacgaggactgttttctcatcgccctttttctttgctcatcttgaaatctagatacacattcgatgcaaaatatgtttcttttcttgtcttggactaacacgtcgcttgtgtatactaaatgtgtaggggcaatacatatatgtctactataaaccgccttaccctccaatgcatcctataaggtttggatgagcataggtccttcgacatctcgactgaacggtttagtctgtctgccatgaactgggtcacaagcagagataacagtgccgatcgttcctcttaagaaatgttcgcaggctttgatagtttcattgaggactttcataggggaagctgtcagacctgctcgtcggttgacttgatgtgagatcgagtacagaaggaccaaacataaccatacagaaaagagaggtgaggttgtgatacaacgtgtcagatggaaagctgagaaggaggaagaaacagcagcgcataagtactgactcattccgggaagaatcaaaaacacatcacagaaggacggatgggttgatccagggatagtcagaactgtcgattcattctgaacggtctttgttgctgccaggagacgatcaaagtcgtcagagtctgcgaactcttctgaattgacggataggaatggacaagtaatttggcccttccacgggtcgagacctgaattttgccagaaaacggatgggagtcagtcagatggtctaaaggcctaaagaagaagatcagatgttgaggagaaagactacgaacgctgcatagcagggtcagtagcgatgatagcacgaggattgaaccgaggatcagcggcggcagcgatctgtgttttaccattgagaatccaaaggtcgacgagagagcaaccaaggtgagtacgagattaatgtggaacaagaagaccaagagtcggttgtgcaacagcttcctctcttttacgggtcccctcttgtagagaacgacgatccacttacgacagccgttcctccgaatgaatgacctgccaaaacataattatctatatcgatgttgcccatccattggtctcgattgaatccttcgcggttctccgggcctactcgaatcttctctcctttgttgatcaatcgaatggcctctatcgcgccgtcgatctcggcaagcctcataattaactgatccttccgaaagctcgtctcatcctcaggttgcgtctctaggtctggccaactttagttatatggttagtgatgatgacaagaaattagccatttgtattcgaagcaaaaacaggaagaaagaaacgagtaggcgcactgaacgtccgtccaatttatgaactcgatcgtcctcattgtctgatcctccaacgtgatgaccgttgatggaacggtcccgtcccgatgttccatgttcgccacgacgtatcctctggaggctagttctccacagaaagcagaatacatcaatcgaggagctcccacgccatgactgaagataatgagcggatatggctttgaatctggcggagggagcaatcgggcgtctttatgagcaggaaaagtcgttccagctgtgaggatgctggcgcagaagtctgatgacgcaaaataacaaaaatcaacaatcgaacagattcatgatgatctcaaatgaggtaaatatacggttttaggaagggatgacggagagacttacgcgcaagccatttgtaggctaggttagccttgttgcccatctttaatagcccagcgatcgtgggttccagtctgagtttgcaagacgccaagtttcatcagagtccgatctatacgttggttctgatctcctagccaagagcactcgtggatctagccagaagagtgactcaaaatacaacgagaagaaggcgggagtagcgcgacttaccttggaaaccaaatcacttttgaagattgacccttctcaggcttacagggatagaataacgtgaacatgacggtctcgagttcaaagccgattttgggctcttgtccttctacatgacgccgggcaaaagtccccttggtctccttctctaccatgaattctgcatccctgactcccactttgtgctcaccactgtatgtgggcattgatcgggaaaggagcgctccccatgggctatgcccgtgaacggctgtgaaggccggggtgttgttcgtcaagcttgccatccagtctcgggctgacaatagatagagagtgagaggcagaagaaggagggataaggcaaatagtacagagttgtcctggaaataagcgatcagagaagataccgatataatcatgaaccagttggtatcagtttcgagctgagaagagaaaggttcgaacgttgcttgactcttgtcgttggtctcgctcaaattcttgtccgttggtttatctctgctatcccatcaaacgcgtcatcgatcgatagcatagtcagggttacactatctccgcacgcgtcgatcgacgttcatccatcacccatcaacaacaccattcagacctgtcgtccgctcacttctcctggtgtatcttttgtcgaatcaagtcgatatgatatcttgcatactctcaggtaaatttcttgtgatatttgtgatctcatggcctcgtaggtgttgccttcatctgaacagttcactccttttcctaaattcgtcagcgtgataaagtatcgagatgaacacccgtcaccatgctctggctgcaagcttgatatcttctcatctcgggagacttgctatgtctgagtcctcagtcgctcaagaggtattcagtttttcttactcccctttctgacatcggttgaaccctcgaagctgacatcgataccttcggtcttattttgtccattcaggaagcactgtgttttttgacagaaaatgagctgacacgttcaggatcggacgtctcagtaactgagaccgatgtatgccttcttgtgcatggaagtcttcatcgttgacggcgaccgtgtgttgacacgttcttgtccttgcctttctatgccaggtgtcttctgctgtccgtcatgccctcaatgaatccatggcgaagtccctgcagaccttcatccggtatctgaatcctgataattccagagcttgtcatccgctcaatctagttcagcagatcgccgatgctcagtcgactgtgagagagaatgagtcagaactcgacaggctgtatgaaagcataagttcggatagggagcgtgtgacccaggttggttcctctggttcctacatctatgaatccctcatcctattcctttcctttttgcttgtatagaaagttaagcaatcctctaaccattataatctcccaatataatccacgcgctttagctcatctcagatgtacaggccctgcttgctaatatactgggtacctggcctccgataattttctcggctgaatcgtccattcacaccaatcttctccaaaagctttctgcgcttcttctcaaactttcccttcttccactcagacaacacgacatcttgcttaagtcccatccaaatctccaagccgccatggcgacctaccaagaaactattcttcgccgaacggcacgagcgcagaaagagacggacgagttgaagggagaaataagaaagtaccaaatggtgacggaaaggagcaagggtgaatttgagaggcttatgagaaccaagtccggactagatgcagccagagcgaaggttgagttggaactggaagagttgagaagagcgattatggagcattagacaaatagatgactgtatgcgccctttcgtccagtatatatctccaacgatcatagatttatgttacggtttgaattctctaggaaactcaatgttcttgcccggaaggagcagttcatcaacctgctaagcgatctacgtacacacgacccggtcatcaagagaacctacgtagtctttagtcttcttcctcctcccctatctaatgatgacttgtaactatatatctgtctttagttgattgcatatttcatatatctatataagtttgtgtaaccatgtgtgtaattgccgtagctcatcagatctgtggttacgagaccatgcgttggaacgtcgtgttccatcacctccagaacttcatctctctacacatccaacaccatcatccttaactgccaatttctctttgatcacatctcgcctcactttgtcctagaagaaacagatcagtataccaaaccatgtctcgttcttatgatcgcggtaagttttggtagccttcttcaatcaacgacgacttggaaacgagctgttcgtttgagtcttcccttgcccatcagcttaggtactgatatgtactctgctctgtctacccttgcgtaattgtcttttctgttttttagccttgaccgttttctcgcctgatggacatgtgtgttcctttcgtttccttttttatgcttgcttttttctcaggctcgtattagacctggctgtcgagattataagagctgacgacccagactatgttacacgtcaatatctagctcttccaagtaagctctccgcccatcggactctgtgttttaccatcttcccaactgatgatttatctacttacaccatgaactttttcaatcaggtcgactacgcacaagaagctgtcgctaaaggaacagccgctgtatgtacaatctccagacgtgtgtgccttcattggacaagatcgtcctgtactgatcattatcatcggaacgggcaactttgtgactaggtcggtgtcaagtcctcgtcatgcgttgtgctcggtgtggagaagaagaccgctcttcagcttcaggatccccggacggtccgaaaggtcgccatgatcgacgaccatgtctgcttggctttctctggtcggtgttctactattctctcaattgagcagactgatcgcttctagtcgacacaaagaactgacctatcatattgtgttgtgtacaggtttgacggctgacggacgaatcatcatcgataaggctcgagtggaatgccagagtcatcgactgactgtcgaggatccggtgagcgtggagtacatctctcgatatattgccgcctacaagcaagtaagtattcaagcttagttttctttttttgtgaatgcgcaagacttatcggctcattgagttatcttcttgcctactttctctcgtagcgctacacacaatctggtggagtccgacctttcggtatctcctgcctattgatcggatttgaccctaatgacactaagcctaggctatacctgactgagcctagtggaatttacagcgcatggaaggtttgtcctttcctttcttgagcctgtcaccaacagaatcatctatctatagatgctaacagaatgtttctctttttctctgtaggctaacgcgatcggtcgatcctcgaaaactgttcgggagttcttggagaagaaccatcgggatgacatgaccagggccgagactgtcaagctggctgtgaagagtttactggagatcgttcagacgggagcgaagaacatcgagatcacagtgatggactcttatggacaactcaaagtctgtttctatcttttctcttctttggttctgttcctatagacttggacggacggtgagctgacagaaagacatacgcttttgggaaacacttctatctgttttgttcgtagaacctgacgctggcagagatcgaggctatcgtggtggagattgagaaagagaaggaggccgaggccgagaagaagaagtcgagattggcggcgacggcggctagtgcgcaagcgatgttgagcggtgaggccgaaacgtccggttcgtcgtgaacgttgaaccttacgcgagacgacacgggcttcagagaagacggaaggatatgatcatgctttttaattgtatacttagaattcgttcatatcgagatgtgcgtcttgtagtgaatactctgtaagagaaatagtgtgatttagatcaagacatatgtacagcgtgaacaatagatgttccgacagggaaaatagagagataaagagaccaaactaaaccagaccggtctggaccggagatctagctatcgactccagcttctctccgcctcttttgtctggctgaaagacctctggacggatcgccagtctctacggttattggatcagccagctcatctagtttggactgtctgacgcgtttttgggaagccctagcgtggttccgtgagaagtgaatatctgatgcatgacgaaagtgagaaagaacaaaagggaaggaaaagatcagcatgaacaaaggactaccatgccagaggactaaacaaaggcatacatgttgtcaagagaatagccatggaaaaagctgctataggcatgaccaacgtctttcgacccaacccggcgagcccagttaggttcaagttcaagtcagacatgcgcgaaccaccacataaaggtggcctcggacgaatacacgttccgatttagagaaatacgaagcttatttaagctcaccttgggcgaagggacctggcgaaacagatcagagcgcatgtcaagtggcccaagattcaagtgttagtttgagaccatgagcgactgaaacgaacgaggagtgcaaagcagagagagcgctctctgaaacgataatcattcgaacgcgcagataaaatggacttgcattttgactcttctgaggcgtttttataatcatgctcaaggaaatgtatgggggaatataaaggatcagataaaccgtgtccagggttcaaaggtatgatgttgaagggcagaaaggaagatgtaagaagagaaggagaacgtgggaattgaggctgacatcgttgagactgacatcagcctgatatgccattcgatgctcactgacgcatcctcggtcgatttacctgtgcgccttgctcccatcccgtaagcgaacactcaacatccactcaccatcctacacattcacttgtagtcccatcctttctctctcatactcatgtctgccaaggacgtaagtgctcgtgatctactcatggacctttcgattcgttcgatcgtccgacattgctcaatagaacagattcggtcgtattgatggatccttcctctccctctatttttgtttctcaattctttttttggcatcgcctcgttcacctttgttgccgtgtttctttctgtccctatcagtactgtacgtgttcttccatatgccctcttgatcctgtttctcagattgagattttctgatcgcgtacgcgtgttctttatttaatcggcctcattttggcatttcctcttacagacggaaaccagcaaggaggataccctgttcgtccttctttcttgatacataaccttgttgcaccttctctcccgtccctcgattgggaagatcaatccggttgagggatgttccggataagatgtgccttgtcttgttgtctggacctggactcaaaccttaccactgtgttttgttttgtcacgactgattctttcaaaaatgaatcgtacatcctccttgattcgtcctcctctcctcacaacctttgcaatcgaccgaacagcagcagcagggtggacatcagcagggaggataccctcaacaaggcggatatccccaacagcagggtggatactaccctccccagcagggcggttacggtcaaccccctcagcagcgtgagtctatctgtactgaattcaagcgatccgatgaatgagcaggagcggaagtcgaggaagttaaaaagatgaatgaagctccataagagcttgctgatctttgtgtccttttgatcatggacggatggacgaatgaacggctcattggatgcaaaaattatcagaatagtcagttcccgttccgtcttcatctattctctctcgataaatcactgattcgccttatacttcttcgtcaattcccagctaccgttcgtccttcttcctctgatacgctacgccataaaccagccagatttgaattttgttttttgaaccagcctaattgcgttttgtatttgcctttacagagccccaagctcctcctcaacaggtttgtctgttctttagaaatcttgcgtgtaggctttgatgtactatactagatattcataaccgcacccggcctttctacattttaatgcaatttttggcatcgggctttatcttaggtctatgtccagcagcctcagaagcagagtggtggtggaggtggatgcatggcctgcttggccggatgtctctgctgctgctgttcgtcctttaaatctctctgctcgtgtgaacttgagtggagaaacacagatatgctcaccatgggttttctctttctctttttctgtttgttctctgaatgggtcgaacgttcgcaggcgctgaggagttgtgttgcgacgcgttgttttaatttcgtcttttgctttctattcttttcgatccaccattcgatcatcttaaacaaacggatgctcgcttgcgccccctttttaggttttgcgtcttcttatgtgccgatgtattccagtcgagggttttatttatcaatgcttgaatgcctttttttgtcttctctctctttacgcttccctcctatgtgtctttctcaaatatccaccgagctcttgttgatctttccttttctattccatcccgtacatctcctttcgatcacgcagggcctgcgttcgatcaagacagcgagaaagaggaagactggtatacatttatatcgatcatgcgttgaccgactctgcctcatcgacgtcttcgtgctcgacctttgcgcgttttgccggttcattcgccactgtcacagcctcctcaatagcggaaggggtaggggtagaatcagaggtagaagtaggaagggcagaaggttcggtagaacgagggagtttcttgagtagagctgaactggctttcccgccgttgttttttcttcgtccaagttctttctttgtgatccggtcctgtaagagaagaagaagaagaagaagaaaagaccgagcgaaagagaggaaaaacgtgtggaatcagcgtcagatcgaaagagggcaaagagaaaaacaagagggagaagaacgactaacctgatcctcgacgatcttttcatcctcgtcctctcccacaggctcagcaggccactttggtaactccaccaagggctgatacaaattcaagccggctcctcctttcgatctctcgtctttcccttttcccttcccgttgtttgaactagaagcagacgtctcgagtgggagagggttggagggtgtgggttgggagagaatagtcttgaggaactcatcaggttcagaaagtttcgaccactgtttgatgtttgtggatttgtgatccgtcaaacaaaaggagggaacatcagtcgttggatattgttgattcaaaagagaggaacagcaaaagaacgaacggtctcggtcgaaagatcgacagcgtgcaagccgatggaatcctggtcgacttcatccaaagagacgagtaaagtagaagacgagcgaggggtgaaatcgagcacgggtcggttgaattcgagtacagatacagtctgatctgtagccatgtcatcagtgatcggtatcgagaagagcgcagtcgctctgccagagagaatcataagcaagcacgtcgttagcaagagaagatatagaagatagagcagaatagaagagcaagaacacatacccaagggaaaggaacacaactctggagccaacctcaaccatcttggtaacgacgagaccttcattgtcaggcaacctttcctgtcgactctcgactccgtcccgttttcgaccgtatcgtttgggagggaaaacagtgatgaaaggtcggactgtctcgaggatagggattgtggtttggagctcgcctgcagggaatgaccagacatgaatagaggaatctccgccggcagagagaagaaggggcaaagtggaaagtttgagaagggaagagatgaatctgaatggtcggggatgaggtgcgtcgttaatggaaattgatcgcgtcacatagtaagaacgaacaggatgtactgactttttgtgtccgagaatgaaacgctcggcgacgaaaccttggggatatcttgagattcggatgtgttcatctcgatcagatgtcacaacgtactgctcgtccggagtcaaaaagagggacgtgataggggatgtgtggcctatgatggataggatgcagagcttcatcagttacataaacaaggaatatttcgaagggagaaaacagtcatgatcgaggcttaccgaggatcagcgttgcgtcagggttcaatgctggatccgcatggatgtcgaacttctttcgagcctcgaccgtctcggcatcctgcttcgggtgaagagggtagctatccaaaggaaacacaccaaggtcgacgtaccaaacttcagttgacatgtttgatcgaaatgtagaaaggaataccaagaaacacgaagcggacgacaaacataccggaatgcatcacccagcttgtctccgatgagaatactgttgtctttagtgaaaccaagggtcgcaatcttcttgaacatagacctgaagacgcgttcgaaaagtagaagatgaccttcgtgtaaggataccggttcgaaagagaaaaacacagctgaaacacaggaatcaaacctcacctagtgcttgccagcctgagagtctttttgtcttcagacacttcccataccttcaacgccttgtcatcggcgaacgaggcgacccacttgccatcagtcgacacagccaaattccgaacgaggccgctgtgactgtctgcggtgggttcaagcccagaagtggtggcgagggcatggcctgtatccggatcaaacgacacgatgtccggtccggaggacaagtagagtgcgtccggggtagctgtgagattgagaagaggatagaacggcatggtatggatggatgggtcaggatgggatggatagcatgggtttttttgctaatattttgaagtcaccatgttgggttactaaccggttaagcagttactaacgctactcacctcaacccttcccactgaaatacgccattcatacgaatccgatcaaattattcttttttacaagcaagatggaatgaatgtgttcttctttctttctcgcttctatcatcttcatctcgtcgaccatcagacacacacgtatatacattcagacaccttctcataatggccactaacattaccttccatcctggaggttagttctctcggttgtctgaggatcccatcactgcgctgtcccccatcatcctgctgactcaacttcatctttttccttctttttttttcagccgtctctaccgaggagcgagccgagcttcttggccagcagggagccaccatttggctcaccggtcttagcgccagtggaaaggtcagcttgttttatgctagtaatcgccaacatggttttggttcgtactctcggttgtaatctatgccttctttatattcttcgcttccttatcggcggcaatcaaacactgtagtccactatcgctaccgctctcgagcagcacctccttcacctcaagcttcacgccttccgactcgacggagataacatccgattcggtttgaacaaggttggtctcaattccgttttttttttggttatttatctggtttgtcaaggcgctaactagagtattcggctctctcatcgcgcctcaggatctcggattcggacccaaggaccgagaggagaacattcgacgaattggagaggtatgctcaccttgaccagtgctctttgcgctttgtttctcaagtacatgtcgtgtttaagagtcttttcttctctatattcttttcaaacaggtctctcttctgttttctcagtcttccaccatcaccgtcaccgctttcatctcgccttgttcgtcctgacctatcttcctcttctttcgtctgccttgcgatatgttattctatcttggagtatactgacctagcttctttctctatttcgatatgattttcaaaacagacaagtctgaccgagatcttgcccgaaagctgcacgagactgccaaccccccgataccgttcatcgaggtctttgtagatgccccaatctctgttgttgaggcccgagaccctaagggactctacaagaaggcccgagctggtgagatcaaggagtttaccggaatcagcgccccctacgaggctcctgaggctgccgagatcagaatcgagaccgacaaggttgatgttgagggtgccgttcgacagatcactgagtacttgcaggccaagggtattgtcaaggcttagatagagggaaagctttcatagagtggatttgcagtgtgtgaaaagtaaggcaaaatatatcatgttgtatctcgattttataaatgcagtcaggaatcgtcctgtcgaaacatcttgggcaaaccccggcacttgcgctgaatagtacagacatcgtaagcaatcattgtaaggatccgacgatcaagaaaagaaaaaacagagagaacagaaagcgcctgtgtgtatgacgatgatgtgacgcgtcgcgtcgcgtcacgtcggcgcattgaatatggaaaaactcatttgaccgtcttttttcgttctcccattctctcattctcctcatcctatcggtccatcttcctcttttccttcctgatcgatactgtctccggtcttgcttgtgttttttttttatttcagcatagatatctctcgcgcttaaatatgtccgacatagagatgagtgagcctattcaggtcgatgacgagcctgtaagtctatccttaggatttatccttatatatgtcagatcgatgatagtgatgaggaatgaattctgatatccgtttctccatgtatcttgaacggcatgatcaaaggtcgatgtttccaaagttgcggcctctcttaccaactcggtcaaaggaaaaggcaaggcggctgatggtaccactactttcgatgacaatctaccttggtgggtttctgatttctttttttgtcatagcagtgcgggagagaaagcttgtgggtgcagcgtcccagggttgagagacaaaaagagtatcagagatctcgaactcttactgacggtagagctgactatcgacgatcggttctatcatatgcttttcatcgttcgctctctttggctttagggttgagaagtaccgaccagttacattggacgatgtagtgtctcatcagtcgatcactagcacgagtacggaacgcttctctcttctcttcgtagaccgaactcaaagtgcttagatgcgtcttcattctttattgttgatcgcctgcttcttttgttctatagtcgagaaattcattgaaaaacagagactgccgcatctactcttctacggtcctccaggaactggaaagacaagtactatcctggccgtcgctcggaggatctatggacagactttcagaaaaaatattctcgaggtaggttctcacacagatcatcaatttgaatgcgtcgatttctgttcttctttctcattgttactgagtgcgaataagaagcttacccattatcctttgtttttctttctatcggaaactgttctagttgaatgcgtcggatgaccgaggaatcgacgttgtccgagagcagatcaagaactttgcttccactagaactttatacaggttggtccaatcttcttttttttcttttgctttgaacccctcagatcattaacagattgagattttcgtatttggttctatagtaaaggatttaagttaatcatcctcgatgaagccgatatgatgactaacgccgcccaggccgctcttcgacgaggtacgtagttctactcgcctttcttgggccacagtcggacagccaatattctaacattcgatcttcattgatattatgctatcatctgggatgaacttcatcttaaaaagtgatcgagcagtacaccaagaatgttaggttctgcatcatctgtaactacgtgaacaaaatcaccccggcgatccagtccagatgcactagattcagatttagtccgctgccgatgcccgaag

SEQ ID NO: 3080 - DNA, 10822 bp, Xanthophyllomyces dendrorhous
gaataaaggtggtggttgaggaggaaaagtaggttctcggtgttatactggcgcgcaactgcctattctctggctgagtgctcattgtgaactctttgactttctgcgtgtgatttcaattcagagtcaacttagacccttcagggctgacggctttgctgaagctctctaaaggagatatgcgtcgagcgctcaacgttctacaggttcggtctctatcttttgtatccgttcctttagcgcacggtgatccttatttgctcatatcttggttcggtctcacccaactcttatcttccttaaaggcttgccatgcagcttttgatgtcgtagatgaaacagctgtatatgcgtgtacaggaacacctcaccctgaagatgtcaggaggatcatcgagagcatgatgactgctgaattcacaacgagctaccagtgtacgtcacttccttgttgtacagaatataaacagagcaaagactacaaaagaacggatcttgatattgagccttgtcctttgacttcttaacggttcaccttctgacagtcgtccaagctctgaaggccgataaagggctggcccttcaagacttggtaataggcgcgtacgaattcatctcttcattagagctcagcccgcctgcgatggtctacctgttggatcaacttgcatctaccgagtacgtgctactttgttctgtgacatcttcttgttatattggaagggtttgtttcggttgtgtctaacgcaaattatgtctatctgtctgtctgtacatggctgtcttagacatcggctctcgttaggaggttcggagaaaatccaactcacaggcttactaggaagtttcaaaatggccgttgagattgatgccaagtttaggaagaatcaggaggccctttgagaggggttgtttgggctgtggcttgtctgtttgcgcttctacagtgatggatttcatgttgtaattctctctttcttcctttgatgtgtgtagtacttgtggcatccgtctacttacgttcagaagaggcgaatgaagaataagaagggagatggagagaaaggagaaaagagttatcatagatcacatcttccatccttcggtccgtttttccatctttctctcacagccgcacagtcaaacggctctttgcccaacttgccgttcacctcgttgtgtctctcgcacaaccacttctccacgccttctctcgtccgagcggcctctcggacagattcttcaccccctgcgtctcgtacggaacgcacaaagtctgaccgacaatgcgggcagggatacagatgggtgagcgacataagaagggatgttacatgtggctgaagttcggagggaacggttgagggaagagagcttgacatggcgtgaaggaacgtccatgtagacctgagtcgtttaggattggacagattgataaggagagattcatgaagcaaaacaaagtcaagacaacattcgcgatatgaggaaagaagagcaaaggaaggaaggaaagggtaaactggatgcttaccggccaagttcctcgatatcgggcggacagtccttccgaagcgccgctagctcttcctccgttcgaacacccaaacctactatcgaggcgcctacgccgccagcggcggtagcggcaacagtttgcgaccctgatgaagaagaatccgaattcgatgtcgaagactttttagggccagcattcatgaatgacttcaaggatgaacacatctttaacgacgttagaggcatccgaaccaaggaaatcagcctggtttgtcctcgtgaatggatttgtagtctcacaggacataagatccgactagccttgcatggttttccattctcatccagaaccactgaccccttggatagcttcggtcgttcttgaaaaggaatccccgggatcgttgaggaaggtagtacactgttcgaggaagcagattcggcaaagaggagaggacggccggtgaacgcgtatgcggttaggagtgctgacgaagtagctaggccgaggaagataggtcttcgtgtggatctagcaaggttgaacagtctggtagtcattgttcgaattcgtttggaatctatctagttacctctttgtcgttgctgctgctgttgttgttgttgctgccgtcgttgtggttggaaggaaggtgatttgcttacttattgtgaagaaaacccctcgtcatcatcgtcatcttctcaaccggcattgacctattgccactcagtcactcaccactatcatctccatcaccaccatcatcacatctatcgccatgtccaacagcttgatttccgtttctgctaaatccgtcggtcgagtagccatccctagcgttaccctcttcgccgccgggaacatagcccaggtcaagaggcaattcgaagtctctctccaggtatgtctaggagaaatgccaagaacgatttaatcaagatctcatctcacaactttttttttcttttttcggtcatcacagccaggtcaaacctcggtcgaactagtccatctacctgcttggctcgacagagagtcattgtccgtcgaggcattctcagatcacggatcattcgacgtatccatctgtacgtctgttcgcgaaacgaatatgacctcttgtatagccaagactgctgatccctacaccattttctaaaagtggatatctcgttcttcagatctgacgatgatgctcaggagggattttctcagtcgctcaaggatctctatgagctgagagatcaccagagcgcagtgttggataccttaaattctgaaggtgactatagattctacaacatgcgcataaagttcgccacgaagcgctgacctatcctctgcccaaaaaaaaaaacagaacagatccttcgagcctatggagaaaaaacaacctctggaggcatctctccggatcaactgacgcaattcattcgagacttcaagagtaggatgatagagatctctagtgagcgcagaaaggtcaatgccgagatagaaacgacaaataagaagattgcaaaggaggagagagctggagactacggaagaggaggacagccgagagacatgggagtcagcgcaaagctgctggtaggtgaaaagggtgtgaagagtgcagaggagagcaaggtgaatgttagattcatcgttacttacagtaagttcttctgttgcttccctcagcaacacgcctgaaagaatatctgaatcagacggcctcttccgatgttggttaaactctcacagtggtaaccggagctagttggtcgcctatatacgaagtccgggccaaggactcgaacgaacaaggcctcttcaatattgacgtaagcttctccggccgcctgtctctctctcttgtttgttacaactgaccatcgcccaacctatcttcagataaattatcgcgcacttattgtcaattctactggcgaaccatgggttggatcgacgctctacctatctacatcatctccccttcggaacgctcgggtgccaaccttgaaaccataccgactatccttcccagcccctcctccccctccgagtgctccatcttcggcacctgctatggaacctcggatggctttgatgagagcggtaccgaaagtattgatgtctgcgagcgttcaggaaggcgttccggacgagatcatagatggggaaagggctactatgaaaggagcagatgtagaaggaggaagattaaccaccatcttgaaggttgaaggcacggtagatgtggcgtgcgacggagaggaacacactctttcgtacgtaccacaattgtctagtaatgaaggggagtggaatttctggaaggctgactgagtgttccctcttgattgaacaatgaggacgtttaggatcgcgcaactgcaactttttggttcgatgcgccatgtcacggtgccgaccgtcaatgcggctgctttcctcgaggtatcttattcctaccttgcataactcttcatcattgggttaaagccactgacaatcgatcatatctcttctgaacaggtcaaagcgaccaatcaatccaaatacccgctgcttcctggcgctacccgaacgttcctagatgggaattacgtctctaaaggccggttaggcaacgtcaacccaaacgaagagttcaaaatcagcctaggagtcgatccatgtatgtactctattttggtttgttttctcatggaagaaaaacgggagattcataatgacaaaacctctacggctcgcatttgtttgtcctacgataatacgtctcatagcggtcacggtcacttgttcgcccgaggaaaagttcaggaaaacgagtggaggatttatcagtaattcgacagaggtgacttcgttcgctcgtacggtacgttagaagtcgttcggcctcgttatcaaaagaagaaaggattcctttttctctgatcgattcggttctattttgtttggttgggatataggtcaacatcactaacaacaggtctaattatattgacctcgaggtcttgtacaactagtacgattgatttcctttcttcatcccctatgttcttccctgcctggacagagctgaactagcatcccggcctaattgatgttccaacagccctgtatctgaggaatcaaagatagtcgtccgacctatcccgtccaacatattctcttctttccctataaaagacagccaagggaaccgaaccgactggcaagagggagccggtgaatctggctctggccaagtcaaaacgatgtgttcgataccaggtgggaagaaaacaacggtcaaatggcagtgggaggtcgaaggatccggttgggtcgtttcaaagtagggatctatgagaactcctttttctcccttctggttcagatcggaaggctattgatgtctctgattgcgggtgattgatcaaaacaaaaacatgcgcgcacacgtacacacatacacacacacacgaaagaatcacgagaatagcaaggaaaacacatgtacatcatcgaccaccagaaggtctgaacaggtccaaagttctccaaaactgaccaacgagtgctttatcgacatgtcttttatgaggatccacttgaagggtggtgacgttccattctttaacggctgcgttaggggcaatgtttgaccagtgaaagtatatgcctttgactaagtttttttggggggaaacaatcgatagataagcaaaattgaatggttgtagaagagagcaggagaagagaacaaaacaaaccgtgatggaagagttgttttgggtcggtccatttatattgagcgaactgccaagtttgacctgttgttaaaacgcactggactctcgacctttgttgttcaacatgcgtattgtaaagaacaaaaagacacgatcgtcagttcaatagaaatgaaaggagaatgagaacaaaagaaggagataatttagaagaaagaggaaatctcaccaaacttcgtccctgtttcctagtttttgcaaagcctccggaccttcgaccaccagatatttcatcttcttgtctccctctgcacaaaagaaaacgatgaccgaacaggcatcagaagtggaggagaaatgagatggttgcgcactaaaagaacggacaaaacagagaggatagagatacaaacctttgccggaagatggcatcgtcctcagtacgaccaacaaatcttcagctttaacttgaccttctgcgcttgctcgatctcgagcatcttttgacgactcaaagctagttcaagaaagaaagaaaaaacgaggtttgagagttgattcgagcaggaggattagcatttacacacatggatggagtcgtgctggaggatgaatgtttggaactaacactccttcctcgaggaatcgtttgacgttccacatggtgatgagagaagtaggcgaagaggagatgacgatgatcgggtgttgattttcttgtgaagtgcagagacaataggatcagatggaagaaacccagagatgattggtaatagaatagagagagaagacgacctacttgttttcttggcgcctgatgattaaagaggggaaagcggcggaagagatacagaaacaagttggtcagatcaagatctcgtctccaactcgaagagaaagagtttgacaaactcaccaagtgcaccaccaccagcactcgctggtatgccagattttccattagctgctccagccgcgccgttcgacccagcgagtgcttccctcatcttcttgattctatcgctaaacacggtctgacgaaggtaagaaaagtctttcttcgtccctccgcccacaggaagtttgcctgttgtcgacgccatcgttggtgaggaggtcaaggtgagcgtggtggatcgaagaggagtcgaccggttgataagaaggatctcggtttgttgaatctagacgcgttcgtgagaaagattagcattgatcctcttctgtaagacattgacaggaggaagaggggaagggaacaagagcaaacatactttgaccacggcatcgacatctgatctatccggtacgtattttcgtttagcaagcgaggaggccgaaggggcttgtccagttgaggaattgatagactgtcctccaacggtcgtcgtcgcgctctcggtctctgtgctagcttttgcttcttctacaaaacggtcgaaaatttggccagaatcagaatgatcagcggctgaaaggaaagctgaagattcagatttgaattcaaagacaaaatacataccggtctcggcaccctcgccattcaaccagtcaatcgttggctttctcttctctgagggaatgaagctcacgccgtttgctcgggcttctcggaggtactccgagagggtcgaatctcgagtttgccaaacaacatagaggataggaaggttgatagtggaaggatgggctgctggtggaacactggtagagtgattattggcatggtagtcgtgatgacgatacaaaagagtggacgcaacaacggagaatgattgaacagaaacgcgttcggttaggtcgacgtgaataaagagaagagaaggaggagaggtccagacaatgaagagaagagaaacccacctttcgaatgctccaatcttttcaaacgactggtccggtccgagatggatacgggatgctgtcgcgagtgaggcaacggaagaaccggcagagttggagagcgtgatgggtgtctgagcgaggatggctctccggaggtgaaccgcaggggaggcgtccgacatgattttcgttctaactctttttcttttctactttgagcctcttccttccttccagctgtatgtacgtgtgtgtgtttgagagacaggagatggcgacggggatgctatgatgaggctttgtgtgatggttatgatggcgacaagagaagaaacgatgcagaggttcgaacagaggagggcaggaaggattagggttagggttatatgggaccttaggtaagccacatatgtattcaaatacttctcaacatcggctctactagcgtacatcctgaagagcaaccaaggcaatcctcgcgcgctgtatgtggaacgttcatcagaccgagagagacacatcatcagacgatgggcttgggctcagcagcgcttagatgatgggttgtgcttgatcaaagcgacgttggctgtctgttgagtgatcttggacgacatggcgggaacagcgcaagaatggcgatgatcatgaattcataagacccttgatgtatcttcagacactttatagttctttcgtgtttttagccgtgatatgatgctcttcacaaacgctcctgaaactgatgagatgaaaggaggagaagagaactgatgaagtacacaagtgtgtagacggaagaaggatagatggaacactgctagcctttgtaagataacccaacaaaccatgagcttcatccatcctttcttttcccttctcccttcctcatcgcgcttcttttgatacgtaccgaacaggacgacggtacctacagacctgttccaaagagagttcgctcggctatccaacgttcttgatctgtgagtgtcctccgtgtcgttcattttgactccgaatttttatgtgttgttttattttattttccgcgcctctttttttcctttctctttcttgctctcatccatcctccatcctccatccgtccactcaacccattcaagtatccctgcccatcgctcatccttcattcaaacagatatctctttcgacaattgaggtttacattcagaagcaaaagaccgacatgcctagcgcagatattcaagtgagttcagatctttggcctgtcggaaacgggcgaatatataaatccgacgcgtcgcgaccaaggttttcctgattcctcttctatctccttctctttttgtccctctcctacccgacaactgcttctctcataaaaaacaaacaaacaaaaaaacgatggaaaacaatcaaacgggaactcagccggtcgtaccagccaagagaggcagaggaagaccctcgaaaatgtccaagctgctcgaacagcaggcgatcgatagagcaaacggaatcgacacgcctttgccagaactaaagccaatcgtttgtctcttcttcccttctttctcttctacctattcgtctgtcgatacatccacacgcgtaatatgtgtggactttactctcgctcaacttgacgcgtccatcgtcacatcctcgtttccaaatgttccactgaaacgcgtagaaactttgtctagtgacttacctgtctttgcctgttctctttccggacgacccatcggtctaacagttgcctcccggaccgaaacgtggtcggggtcgacctcctggagtgaagaacggagaagggcagaagcaccagaagaacaacctcatgaacaacgtgcctccaaatcctctggctcctaagtcgacgacgacgtacccgaaaggtcccggttcaaccggcacaggcaagcgcgggcggccaccaggcgttaagaatggacaggggaagaacacggcgattaagaaggcaagatcatcagaagaagacggtcaaggcgagattgtggaagaagacggtcaaggcgagattgtggaagaagacgacgaagaagacgcgtacggcatacagtcgtcctctccgaatggtcagaagtcagcaaaagacgcggcagcgatgaagaagggtggtcatccgtacatgccagcttatatatccgctcctatgaccacacatagtaccgttatcccgcccaccggagccaagagagggagaccgcctaagaagtagaaaaaaatcgcatcgaacctctcggggtttccccctccgttcgtttctttccagaatggtatcctcaagccgcctgctctcttcggtttgtgcttctcacagctagccttgggttggttggcttcgcttctcttttccttctctggctttccccgtcaacacacacacatatatatatatacaacttaacttttctccttggagccttcgctctttgcctctctctacctccttttcattaagtcttatcccctctcttcatctacatgcttttcttcttcttagcctctctcttttggcctttcgactttctactcttatcaggctttccaaactactcgtatcgaatgtttgaccgtatcaccacctcacttcacttcacttcaagtcacttcacctcacctcttcctacggcgaagaagcagaagctacatcctttctaaattaaatcatttacatctgatcattcgattatcggctcggttctcgtaacaggtaaacccttggtgacggaaccaactttgacgaggacttcgtcccattctgcttgggcgttcgaaagccaggtgattgctcctcctgccccaatttgaatctctgttttgttgtgatcgtccgatcggttgtcccgcagaaaagagacaagacgagaacgagggcaagcaaggtgagactaagccgtaagaaagaggagaaagaaagcacagggacgaacgatcgttctggacaatcatcgttcggatgacgacactgaagtctgctgctccgtctagtgacaaatatcccaatgcgccttcacaagtcgggggatttttatttatttaaaaaaagcatcagtcatcgagatccaaggccaagtttttaaaactcgtgaacaagatccggtttacctgaataaattcctcgaggagcatggccttctaattcatccaagatctgcacggatcttaactttggagcacccgtcatcgagcccggagggaaacatctacccaaagcttctaccgtgcctacaccttcattcaactggccgacaacggtggtgacgagtgtgtggacatggtcgtatgtttctactcggatcagcttcggtactttgacactactcggaagacatattgacaagagatccgccctgatcaagtctacgatctgaatggcatccaagaatcatctagattagctaatgagcccagagacgaagaaggatcaagtgaaaaaaaaaaaagaaaaaaaaaaggaaagttgcgcaccatcagattctcagcgatctccttccgatcagcctcgagcgcattcttccttctctcatcttcctccttgtcgtccagacatctccccaccgtacctttgataggcttcatctcgacctgtccgctgttagtgatctttaagaatcgttccggactagaacttacgaccgtcgtgtccaaacaggggaaccgaaggaaggatgaataaggagctgggttggattttcggaggaggaggtacaat

SEQ ID NO: 3081 - DNA, 21644 bp, Xanthophyllomyces dendrorhous
cgatatgacgcttcctcgtcgatctcttgtccaggcgcatgtccgttttcgttcgtgctaggatgggagccacccgaggaaggaaggaaagacgatcggaactgggtagtcatggtgagctcgtaagattctccttcatgaatggccgatcgggcggcttcgacgagcgagacatattcctctcccgactgatcagacacaaacggtctcaacgacgggcagactccagttcgatcgtctccttcctttcctatcgatttcgatagcccaagctcaaccctcttaacttcagcatcccactcatcgtcatctactccgaaccgaacgccatgatcaatcaaggacctttctaatccatgcagagcacctttgtctgcttccgcaccgttcagctgatcgctaaggccgatcaggatccattccttggtagaatgttcgagcgcgagaacagtactcgaatacgcgaacatcgcgtcttggccacccgatcgttcgtctagcgatcgatcgagcgcaggcggaagatgatagcccgctaaagactctgctttcatctcgtagttgaaccaaccgatccaacctgctttccattccggcccgtcttccgccttcgatccgtcaggaagggatatccgagctgataatgatttctggagtgcgccgagtgcttcaaataatgaggcatctcccgaaacatgagagcttggagggatcgacagttggatgcctgccgagttggattccgtatggagcaatagctttcgttcaggtcggagttcgtagcttaggagatgattcggtcttgataggtacgaataggagaacgagtttgggtcgttcacctttgagctatccaaccacatctctcccaaagcgcttgacgaagaagagcgagaaggcttggtaggcagaccagacggtcggatgtgatacagcgagtcgaagacttgttcgatgggcaaatgttgacctagctgtttgaatcgatgagtgcgcagtttgaagcgcttggagcaaccgttcaaggatggttgagtaggaggaggaatcgaggttatcgagctaggcttttctgaagcaatagatgaaggagatacggcggacacggcctgaagccaagtgggtatcgtataatctagcatattgaaggatgatgttaaggcacaggacgattcggcctttagaggcgtgatgtaggcaaggacttttcgcaagaaattgtgaatgagaaggtgaccttgcgaagaatgaatggactaagttgaaggtcattccaaaaaaagaaaaaaaaaggaaagggctttatattcaattcctgaatgtttgtgactctggggaaagaacttcaggacatgcatacctctgggtggaattggactccgtatattggcttggatttatgggataatcccatgatagccgactcatcatcttccttccatgcatcaacttggagctcttctggcagcgctacaagtaagaacaaagcgcacatcggcatgtgtgagtgatgtatcactgagcgcaaggtagaagagacaatcaaataatactcacacgctcggtcaacccctagactattgtaggtgaccatttcaacgccgtcggtcaccccttcgaaaactccggtgcctaaatgcttgatcctagacttctgtccatgctgaatttccttgacatgaatgatgttccctccaagggaggtagcgatgccttgctgaccgaggcaaatgccaaggataggaatgtcgatcgaggtaatcagcttcgaagcaaacccaaagtcggctggattatctgggcgaccaggtccaggagagaggatgacgcagtctatggaaggaaggataagtgactggaattcttccctgtccaaccagagaacatttaaatcaacagcgagagcagagtcagtatgttctcactagaaggctgaaagagaaagccaaggaatgtcacaaaccaagagaactgatcctggtggatgacgagaacacgctgatggaccagaagatctggataatcagagaacaatgccagaagattattggtatacgaatcataaaagtccaagatgagcactcgagggagaggtggtagagagctcatcatagaggacatatgggtaggaatgaatgtgatcaagggctaaggaggacgccttgaaaaaaaaaagaagatagacggaaacgaacggaggagtcaaaacgccggaggggatcatcgacgatcggcttggttacacgtgaacgccgcgtcggattggaggccgcgtggctgaaagttatcacgcgtcaagaacatggttacgtacgcgtcgacgcattctgaggatccagtgggtgtctgaaacgctacatctatctctacggctattattaacgagatcatgatgtgttgataaagagacgtgtgcttacatacgtatacgttactgggaatcttggttcttgaaaactctagagagactatgcattcaagagagtacaggataatcattaatctgcgcaatcagagcctcggcaacttgctgcgtgagaagagagagttcctatggcaaaaaagaaagtcttcagaaggtcttacatcatcccttctcttgatctctctttcctatcttcaacgctggctagatttcaccctctttcaacaagagttggtagggatacatatatcctttgaactctctatcattaccgacaccatgctgttgctgctccggtcgaaaccattctcctatcccaagaagtcgtttctacaacctacattgtcaaacgtcttcccaccccgttcttctcaatgcagtccgaccatatcccatgtcgttcgctcggccagaccgttcagtatatctcgctatactcgcctcgaggacaaagaaactcgctcttctcccccatcattggagagcttaaaaatcactcctcctgggccacttggcggacctacagatccggcatcagctccggatacttctaccgtaagtcctcagggtatgcatgctgttcatcatctctaagcccgacgccaatctcatctttctttcttctttctctgtttcttcttgttgtttgatttccctttttcttctaacacaaataaacagatatcatctcgtacactgagtgaaaacatatataccatcccaaacttcttgaccgtctctcggattttgtcttgtcccatgttgggctacttcatcattcacggcgactttgtcatggctactactttgctagggtttgctggagctacagatctggtatgtcaaaagatttattatccatgtgatacaacactgttctcctttcctcggatactgacccgaatgtcgtctggcttacataggcagatgggtatatcgcacgcaagtggcacatgggttcggtgctaggtacaattttggatcctgccgtaagtgcacagggcagagttattcctatcgatagcagtctgggattatactgacagtatttttcaatccaacaaattacaggccgacaagacactcatgacaacccttgtcgtctctttgacttataaagggcttctgccttgtgagtgccgccatgacatgtttctcttggtcatttaaagtacaaaggaatgacatcaaattgatgttctcttgggtatagtacctcttgcggcaattgtcttgggccgagatgttcttctcagtttcgccgcattctacttgagatacatcacgttgcctaaacctgtatgccttttgacttcatctttctataaattctcagtcattacatcttctgatattccgacgggcgtattgtctctttcatcatcttagcgaacatggtcgcggtattggaacttggctcagcctacagtcgaagttcaccctacccaaatctcgaaagtaagtcaacaagtcctgcctatgtcttattagacaagacctttgatcaacccacattttatggtcgggtttcacaaacttatacctacacttgcatgttctacctcaagtacaacacctttctccaacttttgttgatgggctcgactacgatcagtcctcttttagtcgcctacggcaacgtcgacttgtttttgattcctcttcagtaaggctctcactcttgatgactttcttgtttctgcatgaacactgacttgagggtgattgcttgatgcctcacagatacatcgttggtaccaccaccatcatctccgggctgagctacctctggacaaaaggagcggtggtcgtgttgaaaagatagatagatcttactgagagcgcgagcgtgctcttctgttgtaaatacaaatgtacttatcgtttcaaagagatcgagaccggaagcaagtatggttagggttaaaagcacagctttgtgaagagtgttcgccgggtaaagcattaagcggacccgacttgtgaccatcgtatcagacttacagaccactcattcttatacagagcagccaactaacatttccttccgcttcatccgctcctagtttctttgaaccccaacaaccatctaccacacttacagtctacattcaggttacatacgatgtctgttttgcaaactcctatcacaaagatgtgtacgttcctaaggttttcacgagccttctgtttgtatctcctcttcgatcagatctggaatgaccaactgagagccctttgtttttttcctcttcattcgtcgttatcttggtccatgaattgtgctcaaccactggtggatggatgtatagtcaacatccagcacccagtcatgcttggtttgtatctgcgatacatacataagcatcgtccattatgtatgtatgtatgatctgacgtgaaatgattcgatcgcttcttttctcagcgggtatgaatgtcgctgctggaccagaactagcggctgctggtgagaaattcattccttgtatactcttcatataatatttcctcgtgtcttgacaatcgatagagtgattatcgtccttgcacaaatcatcagtttctaacgctggaggattaggagtaatcggaggactcggtgagtgagcaatatacccgaagcgatatattcaatcaaaaacaggattggtgaccaggaccttttttaaaaatcccccaatgttgaatttgtcaacaggctatgttcgttcttctgccagatatcatacaatatcgctgactatcaacaacaaagactatagctaatctgatcatcgatgatgggtttcatcccttcagactcctaaaaacttgaggaatcagatcagagaaatcaagaagcacttgaagtcgcccgatcttcgtgagtatgcttgttgctcgatcccacattggtggccgctcaatactgattgaaactcggtttgatgatgaatagctttcggagtcgatcttctgattcccaagggtgtgtccaggattgccgtctagactatatagtatatgtctaataccagactaacatcattctatatcctttatcctcgtagtcggagacggagcccgggcgaccaactatgattacaccaaatacgtcttattcaattttttctcacctaaaaagcataacacgaatacttacttgccatccactctgttgcgtctatcacaggtcaactcggagatttaatcgatgttatcatcgacgagaaaacttctctctttgtatgcgctgtaggagttccaccaaagtctgtggtggacaagcttcatgaagccaagattcctatcatgaacagtgcgttctgtttactttcagcaatttgtattcggcaaaacaaaaggcaagatactaatatgatacgatattgaattttgctactgaatgaatagtgattgggcaccctaagcatgtcgcttacgccctgaatgctggagttgacatcatttgtgcgcagggtggagaaggtggaggacataccggaaatagtgagtttttttttgctggaacgccaaagttttcttcgaaagcgggagattgaatagttctcttgttggatttctgtgacagttcctaccagtcttttgatccccgcgtgtgtcgatctcgtacgtcttgaattctgatacttgataaacaccgcgggacaagataactaacatcaaaatggtgtaaacaggtcaaaggcaagacatcccctcttacaggagagcccatccgaatcgttgctgccggaggaatttatgatggccgaggtttggccgccgcattgatgtggggagcgagtgcagtctgggtaagaaaattctgttttccgtctgtcttctggctcatatgggttccttgtaagggaacacgcgctaagctagtctggttgttcgtttgcctgtcatcaatattacgttgtgatataggtgggaactcgattcgttgctgctgtagaagcaagcgctcccaaaaagcacaaggatttgattctttcggccggctacgacgatgttgagaagaccctgatctatactggtaagcacattctgattcaatcaatatagagggaagaatgaaactcacatcaccaatatccttcgaaatgcaatttcagggaggccactccgagtccgagcgactccatacgtcaaggactggaacaacaatcgagcggacgagatcaagaagctgacctcacagggcaccattcctcacgacgccgagttggagaagaagccggaaaagtcgatggaaggtcgatcttggttgtgagtttactgttgtctttctctatgactgatatcgtactgagtttcatgaaatgacggctttggtatgaacaggatgggaactgtggcgggtgcaatcacggaagttcttcctgcgcagaagattgtcgaagatatgtgagtcctcatatttatcacttgtagagagaaggagatgttttcgcatacgccatatctagaactcaaccgtttttcctccctctctgtctatctgtctttcgcttgttccagggttaacgatgcaaaggcctgcatcaagtccggtagcgagatgaccaagctctaagtttcatcatcccaagtgatgatgactaggaaaaaggaggattgcagttgtagctttgtatttcttatcgacttctttcgttgtactttgttccgagatatattctttgtcgtcgtgggtgtgaccatcattctagtgataccttcgactaagaagcttatgagggcatgttgaaagagatctgatacacaacatatcgcacgccagagatcagataaaacaatgttttatctgagctccaagaaagaatcataacaggagcagattgtttgtggctagagaaggtggaggccggggctccacgttcacaggcacatgtctttcttatctaaccttctggcccttctcaccttcgccttcgccttcaccttcaccttcattctcatccatcaccatcctttctgaagtacacacaattctatgcgtcctaccatccctctacaagactcttcttacggagtcagatccatctctgactcgttctcatttcaggatcctcctaagttacattctatagacaatctgtctgagtcaactgattctctcgatcacgcgatccccggcgacccctttcgagcttcgcctgtgacacgtccccagtcagtcaaccactcggtagagcaatccaaatcagtacatattacagccagacaggcatcctcaccacaagaggctgcttgtccggttagccgggatagcttgtctgagtcatcttttcagtcttgctcttcgtcatcttcgtctgatacactgctgggcccggcttcacctccacccgcaccgtcaccgtcatccccacctgcaccgatcagctactcatcgaatcctctgccgtttatctctacttcatcgatttcatcattctcggcaagtagcttcccatccgccatgtcgtctcctccgatgactcccaactctttcaatttcctttcccattcggcctcatccgaactactctcccattcgatctcttccttaggctcgttcactacacaagacacctataggtcatctagccaagtcgcctcggacgaagaaggatccctaccgacgaatatggatcaagaggcctcgaacggaaacctagtcctgcccactatcgcttcactcgaggcgggtgtctgggacgaagttcttgtcagagaggaaaccgagggcctgccggacgtcagactggttttagttgtaggcgatcaagatctaggaggagatatactgaatagagtagcagaggagattggggtccaggcaggtgagggttcaacagacaagttcacaaaatgttccagtcgtggggttgggaaggatgaaaagtctactggatcaatctggctatcttgctcggcttcagatcctgtaagtgctattggagttccgtttgtttgtttgtttgtttgtttattcacagttcaatcagagagccttattactgagatatattttgacttggatctcgacttgaatagagggctgtggatagtctgcttcgacaaatccatgatcgtcatcttcctcttgccaagcagctttcggcatcaacccaagctagtgatcatcttggaattaaagatatctttgacttagcagctactggtaaaggacgaggagccttggggtggattgactgttgtttggtgctcatcgatccaagtatgtatctgttgaatagattctcagaattctttttttttaaaaataaaaataaaaaatagatactcaagatgatcttatcatgtcccgaccgtttatacaggtcgtttacaacaatgcatttcaacgtcccgtcgactggctcctcgggtacctactttgctcctttcgaccgcacctctttctccatctcaacatgaggaactctatcgacagttgtccgacttgtcgttcgtagatgcctcccggctatcaaccccttctgaccctgctcttgaaccttccgggtccgtggtgtataaacttgccgataagtttactcctttgggttcattcaatgcgccttcttctccgtttgtgtctccgcttcaagatttgttcttaacccgacgaggagttcgctatctcaaccatctttgcgcccgaggattcttgcttactagagcagactacatgaactcgctaactgttcgtcgaacatcacacccaatgcccttcgcgtgttctcgtcagagcacgtaccgacctcgaccggctctgtctagtcaatcgtccatctcgtcttctgctccggcgctcacgttatcatctttccatgcttcggactactcatacatgtccactcaacactgggcggagggctcacctttcctgccaggaacgctctatccaacatccggtgggtcgtccgagagggagactactgagctcgagatgggagaggtttacgatccgttgtgtctgccgagactaattcagggcgcgtggacggcttccacgagaggaagtgtaggtttggtcggttggggggtgttgctattaggagttagcgcgatggtcgggtgggcggcgagagtattccggagcgatgcgtggcttaagtcgttcaggctgcagatgtcgtttggacatcatctaatgctttgatgtggtctcaggttgtctgattcctgctaatctcctactatgttaatgtccaatctctctctatatatacacacacgcgtactctgtacggctcggttggtatgggcatacttcatattcttctcacacagttgtattcagtggtccttttctttattaatcttctgtttctttacttacttcgactcttacgagctcgacacctgctatgttgtacttgaccgtagttgtatgctttttttttgtctccccgtcttcttaacgtcttccttaccactttgttttcttgcctcgtttctccttcttgttccttttgatgacgaccctcacactatatgctatgattcccaccggagacactttattgatcagagaacatgtatgctctgccatatatatacatggccttggctgctaggtagcaacatcggacgtgggcgccctcggaccaccgactaccaagatcccatgggccatggatctagtttgcccccgatgccagggacgggagctaggctggtaacagaaaaggttacaagatgagtaaccgcacaaggggtcttgggtttcagagaagaaatttcgagctcttggggcaaggaaacaggatagatagaatcacctggaccaaggaactaaggagggatagaagtaggagcaacaaaatatccaagcttagagttcatatatacaagtggtctagagagcctatcctatatatgattctcagaccctatgaacatcatagtacaatgcgctagaagtaggagagggaggagtaatgagagtggagggtccataggtcacggcttaccaatcaaatgtaacataggttacatccccaacagaaacactccgacccccaaggctgacacaagccttcaaacctgtgtaaaacctgtgtctatcactctttctgccctcgccccacaacccacacgcacacacgcccacacaagagaacacacagcacacacatacaggtctgtagtccgtttgcttcatccatccatctgttgacacacatcctcacgcgtttggtcgcgccgagttggctactgatgactttgtgatgtgctacatatagatctaaaagacaaatcgtcacaatgagttggtctcaacccgaagactcatcaaccacctcgcaaccaacggcaacgacgacgacgaccatcgaacaaggcgagtttcctgctcctccatgggcatccaggttagagcatttgtctgaggaaccaggcagaggtggagccactacagtcgagtctcccttcaaggaacctagccagctccaaccagaacatcagaccaataggctgtctggttatgtgagtcttggttaccgttcgggcgtgtctcccgggatgggtagttatcctgccgggtcaggaggcgatcaagcaggagccaccggaggagcaggatcagctggtcaggctagccctaatggaatagggtttcccgattcagaagaacgaggagcaggaacagggaccgccacagaaatatttcccgaggaaggagaagaggtcgcggctcctgccactgctgcttccgtcgcgtctgcagaggaggttggaagagagggccagacccagcgagagatcgagacggatgggcagcagccgcctgaaagttcaacatcgagaaatgaatactcgctcagtgcaaacatttacgcggtcccttcagcatcatccaacgcgatccgattaccttcacctacgctcgccgaagagtatcccagtgaacattattcggaatccacgcttccttcggacgcgatggtctcggacgctcatcagcagcaacaacgacaacaacagttcgagctcgaagctcatttggcgtccatcgctcactcccttcgagttgctgaagagcagaacaacgccgccatgggcgtccaacaggaagaagctgcagctgcagctgtcgcggccgaagaatccacatcgacacatcccactcaaggagatgagaatagacctcagaagatggccaaaatcaaaggaaagccggttaccacccaaaagacgcgtgatgccggaatcaaaagaaggaacgtcgaggctcggtttcattgtacggttgaaggctgtggatcaagtttcactcggtacgcgatttttagaatctgactgcagaataacatcaatagaggcactctagctaacatgctgtgctgttctctggttctttgttcttcttctactagatcacacaacctctcaggacatcttcgttcacatgccgatgaacgtcccttcaaatgtccagtctgtcaacgaggctttgcccgacagcatgattgcaaacgacatgcccggctccatgtgccatcccaggcgcagagtttcccatgtcctaattgcgacagaaagttcgctagatccgatggcctgctccagcaccgttcgtattcgatccctgtcgttcgaattcttacttctaatcgatagtctagtttcggtattcgatctgacctcgtgtttatttatttattaaattcaattagagaacatctgtgctttcgcacaaactcagcctgctgctaatttacaagctccgtcaccgccttctcctccaacccagcctgcattcccaccaatggaccccggccaaccgagctacagcaatcccgaggaaggtcacatgggcgagaatggatttgaggcccggcagtcgatcgacagtgggtttgacaatggtgtattgcagggtagttcagctgagatgggagggatgggactagagatggagactagtggcgacaaggaagcgcttgaatcggctgtgaacgagtacatccggtgttatcccctgttccgctctttccgatcacacgagtaggtctttgaatcttctctttgtgaaatgacattttccgacctaactcattcacttgtctttgggtacatcaatcttgctgttcgattctttgatcgacagccagcacgatggctcgccgtcgactttacctgacggatccactgatcccaaccaaagagtctataactctcccttccccgccgagctgactcccccggagcttcttgtctggctgtcccactctgcgtacccgagtatggccaaggatccgtctatccttcgctctcttggcaagctaatgggcttgccttctatcgctgatgatcatcctgcgttgtcgacgaacacgaacggaaaacgtcggttcgagcaagccatggttgaccctgaattgatgaggatcgaagagatcgaacggacatttaaagactttcaagccgcttctgggggaaacgaccatggtgcttttgagtttgattccaatattggaataaatgagcacggcggtccgtcagaatccttcgtcgatccaggccccggaggcgacgagctggtagaatcatcgtctgggtcaacaccttcagtagcggccgcgggcggatccaagtcggaaatcactaggtgtaactatatccagcccatcactggggagaggtgcatgaagacgtttgctagagtgtttgacatgagacggcatgtcgagacgatccatcatagctcggccttggatccaaaccggccagggtatgtttgcgacggatgcgagaagaagttttcgaggagcgatgcgctcgttcgggttagtatatcgttctctatcttctcttttcttttctcttcttcggtatttagattctgttcgagaaaacaaagagaagacttggttgcttacaatgaacttggggttctgtttttctgttcacagcatcggagggattattgtgccaaccggaagctcgaccagacggctgtagagtcatggggtgcctcaccttcttccgtcgatcagcagctgccatccggtgctcaaccgaatgctgaatttgagtctccgtttgacggatcggtcaatcagccagagccaacggaaggtgaagatgaagtcgttgtttctgaacatgtcgcctagacctagaacgttcgctttctttcgctcttctcttgtctttcctgttatgtcttgtctattcttctctatgtcacctcttgtctcgattgttccttctctcttatcttctcttctctgtttatatttgtactgttagacgtgtttgacttgatagcgatgtacttctttacacccttgcactcagtgctaatcctccctcttatgtctactaacgatggtcgaaacgagactcgtaattgttggaacgcgtgccacggttacgccggtcacacacaattttacccttttcgttttctggtaagaggatgtttcttcactttaaccacatccaagaatcatgtctgataccgtccagatcaaggccaaggcccccgttgttgagaagaaggtcgaggagaagggactttccaacgatgtgtacgtttctttttgatctgatctttgcttccctcgctttccttggaatgttcaatctgcataaggaacgacagaaggttagggagtgatgaagagaatgaaaaaaattaacagtacaacctcatgcatctctctatcgtttgcttgtcgtgtgacggtatgtctgttgtcgaaaacggatcttctttcacgatggtcgaaatacgctctttgaagtgtcaccaagtaccagactgcctctaccatccttgccagcgtcatcgccaagctcattccccagattgaggagggcaaggccattattgacctttgcaacgagtgagtgatcgctcttttcttggttctcgggtgagacatatttattgatatgtgtgtctgatgaataacctgtggatctaaaggggtgatcgattgatcgaggagggtgttgccgccgtctacaacaagaagggtgtcaagatctccaagggtgaggccctccctcctttttttcttttcttctcaatctaaagaagaaacgacctcttgctggttccgagctaacggattcgtctattcggctttggacccaacctaggtattgctttccctacctccctttccgtcaacaacgttgtgtcccatttctctccccttgtctctgacaccggagttcctgtgctcgctaagggcgacgtcgtcaaggtccagctcggtgctcagatcgatggggttcgtacgcctttcccccctttatctcgatcaaaatacaattcctggtcgtttgctcatctcggacggcgtgtttttttcttctcttctgtgtaaacggttgaaatcttggtttgaaaatgacagtacgcttcgatacacgccgagacccttgttgtcggtgccaccgatgcttcccccgtggaggaccgaaaggctgatgccatcgaggccgcctaccaggccgcccaagctgctatgcgattgattaaggtcggaggaaagggttacgacgtgaccgagggtgtgcagaaggtcgccaaggagttcaaggtgcttcctgttgagggtcagctctcgtgccagcaccttcagaacactcctgatggccccaagcgaattatcatcaaccctcctgtggatcagaagcgagaggagtacaacaaggtgtttgaggagggagaggtttacggaatcgacgtcctcattaccacctctgccgacggaaaggcccgaacggaggaggccaagactacgatctacaagaagagcgatatcacttaccagctcaagatgaagacttcccgaacgactttcgccgagatccagaagaaggccggtgccttccccttcactcttcgatgcctcgaggaggagaagcgagcccgaatgggtgttcaggaggccgtccagcacggtttgctccgaccttacgaggttgtgtacgtgttcttttctttcgttttctctcccttcttttcgtctttgcttgcttctcttcccactaacatcatgtgcgcgcaacgtgctcgttttgatcttgcctacagccacaccgagaagtcctcggtggtcgcccagttcttcttcacgctcgcccttctcccggccggtccccttttgctctcgcccagtcctgtctggtacggatcctcgaaagtcaagtcggccgagtcgatcaaggatgaggaactcaagacgttgatcgcgtccaagttgagggtcgataagaagaaggccaagaaggctgccaaggctgctggagagggcgaggagaagaaggagtaaactgtttccgtccgccggcctctcttttgcatggagaggtatgtgtatgtcggagctgccggtgggtaactcgaaggaacgaagaggatcgagtgaaaagtaatgaaaaaaagaagagagagagaaaaggaaaggaaggaaaaaatgaacatgatgccttttttgtttttgtttctttcttttcccttgatacaacacgtacgactgtatgatacaaagaaggaacgaccatgacataactttcttcaaccaaatgaagagagcggtcgtatcgcaaaaaactattatgggtccattcaactcgaattggcacaggccgttgggaagagaagggagaagaaacaaataaacagcgttgcgaaaagagagaacgaatttaagagaaaagctgggacacggataatagagagagaacgaatgaaggagaagtcgagcgaaagaagaatggtgaagagaagaaaaagaggaaaaagaaaacaaattgtacattgggttgtccatcaatcggagcagacacatacgcaagactatacacaagaaagtatgtaaagggaagacaatgaaggaagcagaggggccaaggcgagaaatctagcgaatgtggatgatatatatgtatattaagctttagacgacaagcacttataggaagggatacatgaggttttgtgtagtgtgcataacgtatttatcacagagagcgggaaaagacaaaaacgaaaacaaaggaaagtagattgcagcgggcaaagttcacacacaaaaaatagaacaaggaaagtacgaagacattggttatgtgatcgattaacaacctctttcacgctttgcaaataatctgcctatccatccattcttttcctgctttctcgacaggttaatgatcgaacttgtcggtcggctgggaaaagtcgtctgggtgatcaggtctgcttggtgtctggatttgtgatctgaataagctgacgaagccgatgatgaggtcaaggagccagtcgaggacggaatgaacataatggcatcggccgagggcaagaaagaattgacatctgctagggctggataacctaatcctggtcctgatccatactgagagattgactggaaggacgttctagacgcaagtgaagaggaggaacctcgtctggaccggctcgggagcggcggcaacggagatttaattgcggaagaaaaaatgagagaaatgacgttatgcgtgtttgtcagggtgacaacggaggtggtcattggtggggatggtgggatgtctttcggactctcttcttcttcctctggtatactgagccgactgctccagctggaagacctgccgagaccgtctggcgcgggcacgggcgagtcctgtaagatctcttctggaagggtgaccatggtaatggctagattcttttcgagaaacctctgttgaaacttgtcaagcgaacgggcaaagacagcatggaaggtaccatcggatgaaggagatctggcgagggtgggcaggatatggacgagcatgcccatccgggcgggaccggtagaaggcgtaggggtggaggtagccgagcgagagctgcctgcttcagagaacgagacgaaagagccggactttactttactagcagtagctgagtctgatctatcaatggagggggaagggtcggaggacagaaatgttgacctcgatcggggggttggagacggggtcgagaaggagcctctgtgggtcgatagatttgaccgggtggtcgtctgtcgacgaaacgccttgggagagagcaggctgatagacgcagtggtgataaggaaggccaaggagagttgttctttgagtagactattgtcggtgggcggagggagaaagtaaacaacggaatcgagagtggggtcggtttgtggggagaacggttgttgtgactggtcatcttgatctctgtcctgtcgggatttctgtttggccgacggaatcatcatgcccaaccgagcagaagtttttcttgttgacggtaacttccaccgaacagcatattccgcggcttgggtgagaagcgcgctgatggcggtcgggctggtaagtgcttcgtcaaggtgtctcactagtgatctctgtgaacgatgctgtctgggctgtctcttaagcagagtgacggcctctgtcgagagtgacgccagtggtggtaggaggagaagagtatttgcttccagttgatccagtattagatcgagcgattcagccgatgggtctaggcgtatggagagaggtcaagaaaggcaggacgattgaaagagaaaaaacggcgaaaaagaatacaaaagatgagaacaaggcgataaagaacagaaatgtacttcatactcaccacctaggacgaggtgaacagatctatgggtatccgactgagcggcgagactagatagctcatctccatccacgagccagccatcaagggctctgctttgtggatcttcttgtagggctggaagaaaggacgacgggaagaacggttgtgactgtccggctggccgtttgggtgtcaaagggtgaggtctgaacggcatcgaggacggctcaagtcgagtcgtagtcctgggattgccaagagcgatcatcctaggagtgaacgatctgaaaggaggagagtgatgttcttgaaggagagcagcaccgaacagagagctctacgatcctggatgaggtgacgatcaaggtcgaaagcaggacagaaagaaacaaaggcggcaagagaatataaaaaataaatagtcagtaactcttgcctccttgctcattcgtcttgatcggatgctctcttccacatcgaccgaatcagtgttcagaccatgttctccttctccttctgcttctccctgtatggtctgctctcgacctgcctactcactgttctatctgtcggactcactagtgatggttctttgtgaacgtcgactcgcttaacgttgaggaattcgttcctgccaaacgagaactcaggcggaaatgtccgcagtcgattacgtcgcgatcagccgcagtttgtttggaagacacgtgaccgtgacgtgacttcacagcagcgctcacgtgtcatgtgatcacttacatagatcacgtgatctacacacgtgacacctcctgctcatgttaggggcgggagctgggctggtaacggaagggttacgagatggtaactacacgaggctctcagggttcaggggagaagttcaggctcttgagactgagaaacaggattgataatatcactaggacaaggacaaggagacaaggtcggggacagggacgagtacaatggaacaaggacgaggacaaggaaaagaacaaggaaaaggggtagagttaaccaaggatccaagactggaatttctatctacaagtggttgagaagcctgtcttatatctagttctcagaccctatgggcatcatgaaagagcgcgctggaaatacgatgcgctgggagtaggagcaggagaagtagtgagagtgaaggtggaggttctatggatcacggcttaccaaccaagcgtaactcaggttacatccctgacatttcctcccctcatcgttccttctcctcacggtggatctccgaagactgatccttccgaattcactctccaacccaccaaatgaacaagctggccggtggactgaaagcaccgaacggactgccccgactgatcctgttctcgggaaaccactgctctctctgtgacgtagcaaagacagaactagaagcgattagacaaaaggtagagcgtgtcgtggtgttcgatagtgctcatgtttctttcattctcaccttcctcttgtgctctctcaacagatcccgttcgaactttcgactttcaacattcactctgaccaaggtgacctccaacaggtcaaacgatggcgcagactttacaagtacgatattcccgtactccacatggagggcgtcggccggattatgaaacaccgaatcgaccgaacgaaactagaagagatcctcaattcgtggaccgggccggtagatcagacggaacagacgaagagactgaacccggtgatacctccgaagaatcattgagtggtcgccaaatgtttcatcctatttcacttccattttcaattcaaacctcaccctcaccctctcccacccttacgaccatctctctccttctcgacccttcatgttcttcttcttcttcttcgtcgtcttgttcgtcaccatcagcctcatcaacttcttcgtactttgacacgccgtttgaaccttcaaatcgcttatcatctctgccgctctcttctccgacaagcctcctccctcctccatggcgtacggcgctgggtcggtcgttcctcggcctaccatcctcctcgcccgagcattggatccttgaatcgaacacagatcccgaaacagacataatattcatccagattctccgccagacatttgccaatttttctacagagcctgtcggtttaaagtcgaacccttttactgatgagggggaggacgatggcgacgacgatgacgatgatgatggtagcctaggctgggtgatggacggccagggagatcagagtctagccttgacagggaagggccagagcgaggactacgacaatggaagcgacaacaagaatgatcaatcgaccgatgatttgctgagcgatttgtttagctcaaaagatagaactgtcggttccaatatcagatacgacgccagatatgacgccttgctcggagcactcggtccgtccgaccaagagatccaattcaacctcaacacgcccacgtccaccgtcagagagtctcgatcaagtaagagacaccgactaaaaagggtctgcttcaactgccagctcgaaggacaccttctctccgcatgccccctcccgttcgacagaaacagagtcaaccaggccagaaaagcgtatgacgaagagaaggatagtctacgatcgaaagctctccaacaatcggagcttgactccgagcgatccgatgatgacgagagcgagaacaacgaacatatctttcaatctagattctgggctgccgatgttgaaatcgcaaccaggctagatatggctaccaagttcaagccgggcgcattcagccggccattgaaactggcattagggaacatcccagacgaccagccaaccgctctatacccaacacaagatgagcttggcaaagatatctggagaggaatgctcgtctggggttatcctcctggttactactccgtccgaggtaagctccgagtattcatcaagggtcatctggcggcagtgagagctgatgtgtttctcttctttcctgtttataagatcctcaggagagtatcttggacagaatcaatcataaagacgaaccacaagaggatggcgtttctcaggatagggagatcagtccagcgctgttgaatgtgtttgacgagagctcggagattcccaacgagtttggtttacacatgttcaaaccagcctcagataatatggccatggacgacatagacgtgggttctcatgtcgagaaggcgtcgaccgaagatcaaccgcgggttacactctcaccttcatcttcgcatcatcggtattcttcttcctcaccgccaccgccaccatcatctccatcatcatcaactcagtttcctctcccagtctctacctcgacgagatgggttgcttatccaaccacatcattctcttcagtcctgcttcccgttttccatctatccaaaccttttcctttacctcccattgcttccgatccggtccatttcgtttctccgccgtccgtttcatcaacactgccgctaaaggaagagacagaagccgaacgaagaaagagactgtggaatgagctacaaaatggaaagttgacaagaatggagatgggcgtatccgttcctcctgttt

SEQ ID NO: 3082 - DNA, 9896 bp, Xanthophyllomyces dendrorhous
  misc_feature (3280)..(3289): n is a, c, g, or t
cctcacatcgtcctcattccccgtcctattcttatccccagatcttccgctcctctcacaacaacgattacagccatggtcatgagaacgagtatgaggatcgatctaggttctcttccggtctaccagtgcgctcagttcggcgagcagtcagctcggactatcgttcttatcgttcttaccccaacccagacgttcgaaatgaacagaacagggagagtagcagacgtaaccgagatgaaggaagagactgggttgacagagaacgcacagatgatgaagatcggaaaaggaggagaatcaggtggtagagcgatctcgtttggaattgtatcgtggactgttctcttctttttcgtctttgtctcttccaaagttggcccttcctttcaagttgatttgatcaagaggggtttcgtctggtttgacttggttcgtttcatcgcatcttatcccaacccaacatcattctttttgtgcgtccggcgtggtcatcattgttctttcttccgaaccctactctacaatacctcggaccctgtttctatgttccacgatttacgttctacgttctacgcctcacgttataggtttcgttcccgtttctttcttccacttctcactttttgatggccgtccagcacgcagcctatatcatcgcatcgcatcatatcgtatcatccaatcaaaattgatcaaaggatcgatttcagttctatagttctatcaaacgatgatcgttgaaggaagagacagacctcgtattggtatttgagcatcccttcgctgttacctgtatatccagatgggacagtactctcctcctgtattttgttgtcattgttatacatcagtcaaacatgaaacgttttgaaaggtcatcgttccgaatcagttcaaactccttctgaaaaacaaaggggctgatagaagtcgagtaatgcggaaagagagacaagaccgagtagaaagaaacagaccttgatctcgaatccgacttcagcgacgagagctttgacttcatccaaacttaattcgaccgagacgtcctttgacgagttattctcccagcttttatttccccccccggacaaacacataaaatagatatcaagaatcaggtcaaatagagagcggttagtacgaggctctagaccaactatgagcggacgagtgagtagacatagaactgactgccacaggagaggtcctaggttgatccaaattcctccaggtttcaacactcgatagatcgtctcgagatattctacaacgtttttcgcctatctccaccattcacatccacattcatatccagcgattcaaatgctcagtaaatcattaggaaataaagccaaaagaagagagaacaaacgcacagtatcgataaagaaagaggtggccacacagtcccattcttgatcctcgtctccacttccatagatctccaaaaagtcaccggcgatcagactgaagtcgcttcctttcggtaaatcggcaggattgacatccgggatcctgatcggtcgaaggagagcctcagtagaggtctgattggagaaagtgtggatgtatggatgaatagtgtgacagagaggtgcggttgtccggttaaggataaagaatgagcagagcagcataaagaaagagaactcgttgccctgggatgcatagccttcattcgagacggtgttataggaccatatgaaaaaacaaacgatcagcgcgtaggtcaaactcgtatacaacagggactgatattgaacaaaccttgaagcgcaatatcgtatgccagtcgagccagtccagcaccaggtgtcagaatcttgacatccgcgctgaacgaatcaatagccgaacatcaacttcatcccaatcagtaaagatgcaacttgacgagactcaaatcttgatcatcaagacttgccgttcttctttggggatgtgaccaaattgactctcaatgacgtccatgataggcttgtacgcagcgtccctctcgggtcgacccttgaaaggcggttatgacggaaaggggagacattaggttcccaccctgaaggccacaagcgcaagaaaagcacaagaggctgcggactcacttcgacactccaatccctaacaaactgctttatggtcgatctcatcttgtccatatcactctccgatgatttcctgctgaggagttccttcttctcggcctccttcttctctttctttgcggattcttcatgcatatgatggtgcgatgatactccaccgtgggagtggtcatgaggttcatcgtgagagtgtgaatggtgctgatgaggaggagcaggcgaggatgtatcaaggtcgtcatagtaggcatccaaatctatttggccgtggcagagtgattcaaaaagagtcccgtcagaattcagtggaaaaaaaaaccttttgcatagattagtctttaatcaatccactcaccttcatcgtcttcatcttcgtcttcatcctcttcctcgtcctcctcatcctcatcaccaaacatggagcttccgactgtatcggcgatctcccgaaggaaatcagcattgactctgatagcatcgtccaccttggacaacttctctcgatactttagcttgttgagaatggcctggtgaggctttgaaagggctgtaagagaaccatcgtccacagacacttacttagcttctacttaatcgggataggctgagtaactcttgaaaccgtgggcttacagaggaggtctttgagtcttcggttgttagcggataactgtcatatgaaagcaaaagcaggagcaattagatgaatgaatccccatagttttcggcaagcaagtcaaaactcaagagaagacttgaaggcaagagaagataaagagaggacggacagagtaagcctcgtactgatagaagcatcggagcacggcgtcgaacgcctttcgctcggccttactagcttcgatctcctgaggagttggctctctggggccaccacagacatggttgggatcgctgtggtcatgggagtgagaatgtgacgaagcttcgtcatgagagtgagagtggctcattgtgcaagtgtggttgaaggtgatagtcaatcatcaagagatttgaggattcccaaataaataaatagatacacaattcgttattttattttatttccgaccattttggtatattcatttgctcttctttctcccttgtatctcacaccttgactcatcgcgctttgcacagtgtccgacacaaacacacacacacacacacacacnnnnnnnnnnacacacacactatatatccgttgaggttttatttcaatcagattcttgacccgttatgcatcattgataaacatggtgtacgagaagtgcatctggcgcttcccgttctattcattttctcaatcctcttcttcactcgtgtcgtcccccatatcgatctccgggatctctccgtcgtcatcgtcatcatcatcccctcctacgttatctctggcctggaattggctgacacgagcttgttctctcgcccgtgttctctcctgctcttccgccgccattttctgcgcaacctgactatccttcaacgcaatcgatgcaggaacagtcatcgtctcgtccttctcctgaacctctgcgacctcaacaggaggatcaaacacactggactgggacggctgaacgaacgcagtctcgaacggagcagatgtgatcgtaggagggattgtggtaggaagtgtagcagacatagacgcgctcaatgaaacgtttgtttcagttggtacgatattctcaatcagagtgttgagaggggcagagagatcgagcattggctcgacgggtaccgaagttggaccaagttgagcggtagaaagcgtatcgaatgaaagagactcccggttggtctgctcagtacgtccttcagatttgtataacagaagcgaggaggctgctggaagaggtcggggaagagcagggagaagaggatgcagcagagatccgagggttgactgtttaagcggaaaagtgaagacggccagtcggatcagcgaaaacccgatcaaggaaagaagaagaagaagtgtttggatacgcagagagcatgatactcacatccttaccaccctcgtttagagactgaacaacccacccagcctcaggcccaaccgtcccctcccttgcgctaggtccacttgataatccatcgaccagtaatttcttcactccatcctccaactgagcccatgcctgggcagagtgacctcctgcctgccttctagcagaaacaggcaggttgatggagagcgaaagaagaaccttggtggcaaggacgtaaagcgccggctgaagcgccggatgagggagtattgcggagagaagctcgatcgaaagcatcgcagtaggaacgactgaggcggcgagagccggaagagaggaggtgagggcgagcgagttactctctgcgtgcgaccgtttcttgcctttccctttgcttcctccattagaagagctagggtcttcttgtgaggcagataatgctgccactcgagaaggctcaaggagttctcccaggttggtcaaggcgattttaacgattcgaccagttagactgcccgagaccgcgtggatcggcgcgagaggtccgatcttgctaagaacgagcgaaagggttttgagcagtgcctgatgcaactttggctgatgggccgtcttttcgagtagatataccaaataggacacaatctccatctgatgtggaagaagggcctgcccagagcacaaagtgagctggccgagtagaccgcaggcaaggatatacaactggggaagcataactttgactaggttggattcctctgggttggcatgatcagccatctggaagagtgggttgacgttgatgttggtcagaatttgaaccaacaaagaactataacacacagcgacgaatacgaaaactaaccaatccgtccgaggtgattctgaggatcctgtacgggagtgccagcacggttcctgcagggatggccactcctctggaagtaggttgccgcagcataccagtaaccaacctaacgaacccatcgagcctctcgagcgcaacagatcgtttcttcaaactatccctttctttggcgagctctgtgaaacctttccatttgattcctaactctccaatgtcatctctggcctgtcttccgcccgcttgttcctcaaaaactccctggaaaagcgcatctagacattcgtgcgcgctcgtgagagcagattggagatcatgaacaaatgcctgaggcgaggccgattttccgggcaagaggtgaagagacgtgtaaagcttgacggcagcctggcgtgttgacggatgctgtgcagttgacagaccggcaagggaagtggaaagcagagaggcatgaagcgctcggacggatggcggatgtaaagcgacaaggtgagagaggaaaggaagaatggggggaagagcgaccaaaggaaacttttcggtccatacgaggagattcaatgtgtacttttggaggttgggtaaggtgatctcccgatggaactgggggttagagctgcctgagttgaggaagatggatgaaagaagtcgaacgaaagggccgataagatgagacgccaattgtttctattgttgggggttgaagagacgaaagaatagagtaacatgtattgagacaatcgatatcagctctttcctataaagtaaaaatgcatgcgtgaacgtaccccgacgatacccatcaggccgaccacccagtttctaccaaatctatcaagaatttcggctgaagctctgctttggtccataacgatagctccgatggaccatcctgccaatcggtttgcctcttccttggaaaggatgagggcatcgagagctttgaggaaagacgttaagacagaggaagggattttgggaagaacctccggatgaaatggagcgtgaatttctatgagagagacagtctgagagagaaaccccgggtgagacagagtactccccaggaatgccaacaaagatgcagggtccgacatgattgaacgagagcgtgagtgaaggatagctaggagaaaaataatagaccagagaagttcaggttgactgtaagaaaatgaaatatttgcactgcctcaaaagtgttgtaagtcacgtgtgtggcgtcaaatccattccttcgccatctatccctccatcctgtgttgggccctccatcttgtcaccttgccatcgtcacaccctcatcgttcagtcgagcgtgctgctttatcctcattatggcaagcaggtttgagccggatccagcgatcgaagaagttctcaaggttgacaactttcaggtccgtggtttttattggatctctctgcagacagtttcctcaacttatcttcggtcttgtgccctctcacctctatctctcttactcttcacaggatcaattcgatattcaagagtttatctcgacactttctgacaagctgatcgccaactcagttcaatcctccgctcgtatggtcaaacttctgccttttcggatactcgtcgctttcaacttgattgccacgtccgaatagactgactctggctctcttcttgcttagcatttacccccttacccttccttcagacgttttctcatgcagttgattcccttcttcaagttcgaaaagaagtccaggctagaacagataaattagaggcagaagttagcaaggcagagagagagtacggaaggaaactcaaagagctcgatcgcggattcgaggtaagttgatctttcttcatctagagaagtatgctaagattattgactgatgttcaatcgtctacaatgcacaggccgtttcagcttcatttgctactatatccaacaccacctcttcaatcggttctccagcaatcagaatcggagaaactctcgagacgcttcatatctctcgttcaaaagcgcagtattcatccatactactctcctactacatcgctctctccaatggcgacagttctctgctagacagactgctcaaggatgcccgtcgagacggccgggaaggcagagacggaagaatgagatgcgcagtggtattgagaaggctggcgagtttagtcaaggaggattctgcagatgcaggaggtaaaacaggaaaccgaatcgaagagtattgcgaaaagtttgagaaagaggtccttggactgtttgataaatactacaggtgagcaaacccatattcaatatttgcctatttacaactcaatccttcatgagtgcatgcttatatgtccttctgtctttacagacaaggggatcccaaaatgatgggcgtaagtgatactgatcaccagcgcatgtatttcctgaaggctattaacttttctggttgtatcatgtttcaatcagcactgtgcccgagtccttctggagttcaacggaggtacttcctgcgttcaaatttatgtgaatcagcatgactttttcatctccaaagatcgaattggacgtgtcggatctggaaattacggacatgaagaagctactctgtacgtcatgttctgatacgaccccatgatggctgcatatatttgatggtccaaaaacatactggcggaacacactcaaacgttgatttccttacaaaatacagttggcagacccttcccgaccctttcaagtcatcttcgacaacggaaccaacgctccgtagcttgtatgatgagattagggtgactgtctctcaagaggctcagattattcaggctgtatttccgaatccgccaatggttatgcaagtcttcctaaacagagtgtttgcccaagttgtatgttcttctttcatatccatgatatctctctcacaggtcagcttgtcaatatttctcattcgttgacattattcgtgtttatacatgatagatccaacaaatcctcgaacgcctccttgataaagcgggcaaaatatcaactctcgccacccttcgaatcctttatatatcacatacaatgacgtccactctgatcgacgatctgaaagcgtacgagtttccctctgcatcatcttcggggagcagatcatcagcctcagacccatcagcaggggattcaacagtgggaggaaaagcaaaaggagctgatggtgatggtgccagtactgcggtggccgtcatgctggaaaactgtctggaagaaatgtttgcgcctttcattgaaggggtccggtacttggagagagagagtaaaagtttggctgagctatacgcgggattcttggcaaatttcaccaagtaccatgtttgttctcttctgtcactatcttctctttcattttattcatatcgattgagtctgagacacttttcttctacgaccggcttggttatacaataggaaaccgttcataaagcaaagcccaacaaattgttcgatagagtagtcaatcaactcgcctccgcctccgcctcctcaagctctcaaactacccaagccgctgcgtccgctatattgaagtactccggtgtgagtgaaaaaacaccaggcggctcggtagaggcagagctagaggcaggcggaatcaaagttgaggatggagcactcaaaatggatgttgcagaaacgatgttgaagtggcatgccgaagctgtggggagatgtgtagaactgagttcatcaggagaagtgtgcgttctgcgttcaaatttgcgagtatctttcatgggacgcgatcagctaagaccaatcgatccttttatgcgattgttgctcttcaatagaccgaaaggagcgtttgcattgatgcgcgtactagcagaagccctaggtagatcatatatagagactgctcttgattcgtgagtcttcgctctcttctctctttccttaactctgcctcactcaccacaactacgcttgacaccccattatcagaacattagctaagatggacgcgcatgatccaagactggaaccagatctctctgttcttgccaccgtcaggtctgctgatctactctgccatatgtggcagaaatattcgtctgtggcgctgcttccgctagctttgtcttcagtcaccatcagaagagaaatggtcgcttatagtcagacgaatattggtagggcggaggaaaagatcaatgcaatcatgcagacactcctcgaccgtacgactccctctacctattcgctttctctgattagttggcttctatgagatttactaacctcagtttttttttcactgcgcgtcatcagtcatcaattcttggcttgctcttcagctcaccaagcagaagaaactcgattttaagcctaaaaacgatgatgtctcgttcgagagagtaaacaccgaaccctgcacattggcgctagacgtattggaaaaagtgaaggtagcgactaagtcgtacctcagtggtaagaatgctgatgggtttttgaccgaagttggagttggcttccacgcgttagttatatcatttgttattcttcacgcctctaaagtggtacagcggaatcgtggtctagtatagtagctgatagatctaggtgatgtcattattcgtaaaagattgctgctcgatcacctcaagaaattccccgtcagtgtgactggagcattgatgctcacaaagtaagcttttgccgagcagtttttacttcctttgatatgacgacatatctgatcatctttctgaccccgtctatatgtttctgttatacctgtttacagagacctagcgacttaccaagaggcaatcactgcgtttggaatcccagtgttgaatgaacgattcgccatgctccgtcaactaggaaacttgtttgttgtccagccggaggtcctcaaaacgttcatggcagagtcttactt

SEQ ID NO: 3083 - DNA, 17072 bp, Xanthophyllomyces dendrorhous
agagtcttacttgggccagattgagccgagattattgagaccttacttggcccagcgagtcgattactcgacgtatgtctcgagttaatattgacattcaagtcgattcaattattaaccttgttcttaccttctgttcgtattcattttcatcagattctcgaagagatttgcggaggacgaacgtttcggaatcgacgtcgacgcggtggcagctggagcagccgacgctgccatcaggatgcggagcaccctcacaggtcaagctcgaagcttgggcaccaaaggcttgaaccggctcagcgtaatgatcaaagagcttgacaactacgcggcttcttcctctgcaagttctagtccgacaggaacagaaggacagcacgtcggtcgatcgtctccgatatcaggaagagcatcgccgaatccggctgctcggggagctatcccttatttttctaagatgccactctgagagccgtacttttgtcttgatcctctctcatttgaaccgctcgccttgcttcttctcttatcatagatgataccccagtttcttcctcgctttcttatctcttccaataatatctagcacttgtatctatcaatcgcatctcaccacctctcgacaatgtttctatttaatgataccctgtctctcgtcgttttcttctgccctgaccatactgtacatagcatgcttggattttgcagaggaagaagaaagcaattacatatgtcatgatcatacaaacaacaaggaactgagggaagaccgagaacattcgtatatccgaagtttcgacctgcaggaaaggggtttctatatctacgaggccatgacttcatccttcacaggatgatctccgtcaaccttgttgacctcacccagagcactcttctcgagttcccaactcctggaacgatcgggaaaagggtttcgatcaacactgtcagcaaaacatcggattgaggacgccatgatagggacaagaaaaaacaacgaacctatcaaaccatttgttcggatgatccaccgactctccatttcctaatccttcacctttctgaacgtccgaccgatgggtgagctcgaataccctcgtgcaagcgacatgatagtgggtactcttcacttgattcatgacctcttgaagatctggtccagagattcgataatctttttcaaggaagagagatagtcgggcgggagcaaagtgtcggaaggggcagccatgaatgtcttgtgcgccaggctgatcttgagtgagaattcgttgacaacttgatgcaaagagttttagaaagggtagtaacgattattatttcagtaagagaatgttgcgcaatcttatgtaggtagaactatacagaagaggtgatagctccgtacctttttggggcatagttcatctttcgaccttcaagtccaaacgaatgtcgaatattgtactggtattccttcctaaacgtatcgtccgtcatttttgacggcaccaaaaatgcctttctccaccataccaaggcttcctcgactgacagacccactccctggaggtgatattcacgtttccagaaacccaatcaatgtaacaacaaggattgtcaatgtaaaaacttaataaatagaatgagtagtatgtcaggacgaaccttcaggaacaacccaagctgaagtcgagcgtagtgtttcaggtgatgcacgttttctgtaacattccaaagatgccgcatgcaaggtgggaaatgtctaggcgccagatgatcgatcatctctgccgtgacagtctcggaattgttgtccggatcgaatgtgtactcggtagacgccgagccggtgaggtacgagagggaaagatggtttaaaattggtaagagccgttggtcttcgtctaatcgaggaagatatttggcagtgagctgttgttggttgttatcattgaagcgaacgaatgtttatcagttggcccttaggtaaaataaactctgaacacctctataatgatctttacaaacctctaaaccagcttccagtcgagcagaaaatgcttgaagaaccagactgagctgttcgctctgcggaacatatgccaatcctcccttaagtaacacttttctcttctcaaccagatcggggactagtgtccagtgaactttgtagaacgactgcgctcggaaggcgctttcgtctaacttggtaactgttagcagatcgaacttgagagattctttttctggttcagaaacctgttggtaccaggtgaacgagagatatcgatccatttgttcgagaggaaaaataggagagcggaagaggggaagagggttagagactgtctgtgataacagggcgatgttgagaacgtcgactgaccagcttccaatcaagctgcaactctttaaggaagtttgttcgttcctccttatcatcgctctcgaatcgaattttaaacagggttgtttctgctcgtaggtatcgttttcgtagttcctcactttaggcaatagaatccagaaacacacaacatgtcaaaagaacccgagggtatccaaccagatgcttcagtttgggttgtcctgcctaaggagaatgagcgagtagagaatggctgacctcccgcagaaagctagccttagtacgaaatgactgatcacatccttctttctctctgcacttaagtcaacattctttgctgtgttagcactcaacggaaggtacttcttggacgcttgctcgtaagacgttacgagctgggatggcggtagtcctctgatctgagcggattcgataagtgaaatgactgtttaagagatccagcgattgaaaaataggaagcgaaatagaactatgacggttgagccaaggaagttttgggaccatgaaagagggaagacacgcaaacaggacgtacttctaagtcgagcgattgcgtactcctcaaattcctccaaagttacatcatccggaggaggtcgattataactattcgtgccaggaggaaacggaacaaacaaaaagcgttagttcatgcatgggcaaagctcaaaatctcatcagagaatcggtctttgtgtcttttcctagctggtcctttataaacttcagaacgaacaaggaaaaactcacaagtttaacctccaaggatatttcgaactctttccatgttttgtaacttccgggccagatggaccccttcttctcgagctagtagctgcgaacatctagtatggaaccggtgatcctgtcgattgctaggggtatctttgtggcttgaatggtcttaagtagagctctgctacggtaagaaagagtgtaccaaatgagaaatggtcgaaagcaagaagtaaggttcgagtaggcaaaaggcaagaaaaggcgaagaggttctcttgacgcgacgcgtctcgatctcaacgcgtgtttgacgcgtctcagtcaacactcattaaacacgctcttcacaaagaacaatggacggcttgcttttcttcaagtacacgttttgcatctatcatgtttcatctttttttatttttggtatgtagtatagaggtgcacagagaaaaatgaagggtaagagaagaagaataaagaacagaacaagcaaatgtaaggcagcgtgaggaagatgagaaaccagggcaagccgagatctatgaccagatacgtatgattgaagcgggggggagagaacgggggtcaaactgcttgccaatgaagtagaagaaagtggacttgacagaaaccccgttaagaacacgatgagagagtggaaccgatggtagagaaacgattatgcgtcgatctctccattggccacggcagcctcagccttggtagccttgacgacggctgggtcaacggccttgagcttcatggcagattccgggtgaggcggtcggaactctcgctcatttcgggcgagctgttcttccaagcactccgaaccagaggcggcggcaatgaaaccaaggaaaggaggtgatgggttgagaggtcgggagcagaactcagggtgagcttgaagaccgacaaagtaagggtgacctgtaatttcccgatgaatttcaaccagagccatatgagatacagaatgagcaactgcacgacttgattgtgcctgattgacgtagagaaagcatcagtctgagacggaaacataccagtcatctcgatgatctgcatcctctgtccggtctcatctctacccaagaacttcaactgctctccgtccttgtctcgtgccttctcgaacgtgggaaccattttagggttgacctcgtaccgatgtctgtgcctctcccaaacggcagactttccaccatacaatcgtcggattttgctatcctcagtcttgggctcgaacatggttggtcgcaaacccaaccgcatggttcctccaaggtgagtcttggagatctcaggcatgaaaatgacagccgggttgagggtatccggggtcaactcagcagagccagcatctatgatgcggagaatttgatgattgaaaggttattgatatagacctcgaataacgttgtaagaggggaaagagaaagcatacctttgatgccacagacgtgcctagcccactcgatgacggcaatctgaagtcctaggcagatacccaagtaaggaaccttgtgttctcgagcccacttggcggccacgatcattccctccgttcctcggataccaaaccctccaggaaccatgataccctcagcagagcaaagagccttccaggcatcgtgatacttgacagggtcctccgtctggacgttgggctccaaatgggaagattcaacccactggagcttgagcttccgaccacatcgcatggaggcgtgctccaaagatttaacaacactcatgtatgagtcctggagcgaggtgtactttccaacgagaacaattttgacagaatcgaaccgacgatcatgtctggtagaaggtcaggatatgaagttttagcaaataatccttgggcaaacattgcttcctcgttagaaatgataatcagaatgatggaaaatcagacgcttacccagaggtcaactcggtccatctacccagaagactatctcctcgcttctttccgtcaggtccgagatcgatctggtcgagcgataaccttttctggaggtaggtcaccaaaccctgatccctcaacagcaaaggaacgtggtaggtcgaagacacgttgtgaacaccaaacacctggttcgacgccactttgcaagtcgacgccaccttccgcttggtatcagactcgagctcaacctcacatcggcatgcaatcttttaatcgtgttgaaggaccgttccgcgcgaagattagtttgatggattacttggctgatgaagtctaggataaaagcacgtacgatgtcggggaacagaccggcattcctgagcgccttgacagttgactgggtaggcttcgtcttctgctcacctccaacgacagggatcaaggtaacaagtgcgacggcaaagttctccacaccgactcgctcttggaactgactcatggcctcaacgaaaggagccgactcgatatctcctacagttcctccaagctagtttgaggtgagagatacaatgtcaacgacataaatcaggtggttaaattataatggaagagacgaacctcgatgatgcaaacatcaggcttctcagcggtctcatcaacgggctgagcagcgacgttctcgatccactcctggatctcgttggtcaagtggggaacaatctgtgaaccgagtgccatgtcagttcgcacatggcagagatagaggtaatcaacgaacgtacctgaacagtctttcccaagtagtctcctcgtcgctgtaggtatgaaaaggaataacagatttaggcttattcggctagaaagataatctatagtatggaccgacctccttctcaatcactcgctggtaaaccttgccggtggtcaagttgtggtttttggagagagtgacatccaaatatcgctcgtagtttctgcgcaatgatgataataatcacaagagagtaacaacgatatccacgacaacagcggtagtcatgacgtagtcaagtcaaaggggaatatcagtccatcgtcctcatctatgccaagtgatagattgaggttgaggttggacgaaccccaagtcaagatcaacctctcctccatcgttgagaacgtagacctcgcctgtaacgtttccggtggcgtatgcgacattagcgattcagggctagaaatcttgtatttgtttttctgaacgtgagttagcttaagaacttaccgtgttcggtaggagccatggttccagcatcgatgttcatgtaaggatcgattttgacagaagtgaccttgagaccggtagtcttgaggagaaggccggtagaggaagctattgtagtactcgagcatgagtcactttgagcccttagacgtgctcaagaggagaactatctcactaaccaataactccctttccgataccgctggattatggcagtttggccgggtaagtataccgttctatctataagggtgagtttggtaatgaataagaaatctaaacgaacgaaatgacaccacctaaccggaataaaaccaagagcacatcaagatgagacatggtcagcttctcaagattcactatcattcagcctagacaacagcctggacacgtaaggtccgatatatcttgcctctacaaaatctcaccacacaaccaattaatacatatacgtaccacagacaaggatgtacttggtcattatgtgatcttgattagttgttaacaaaagggccgggagggaaggtaagggatatattgcacgctgcaccaggcagggaaggaaagaaaaagaagaggaaagagaaaaaacagaaaatgcagaaaaagattaacgaaaaaaattaggcagcagagttcgcggtaacaagaatccggattgttacattttgggttacgatgatggccacgtgaatatcgattacctaacaaatgttcattacgtaactagttcggccttgcctcgtaccaactccaaacatctcgtctagatacacggacaccaaggaggaagcatcgacaaatacaaaccatctcttaacatgtcggggaatacatacgacattccttcagactggcattcctccttggccactccttccacttcatcagcttcgcagtcagctacttcggccttgttgctcgaattcgatccgttagaatctccctcggtcacagactcgccctcagcaccggctacactgccatccagttcagcttcaactcgatcacctccacctgcttcctctcctcccggccagacatcgtctagtttaaatttgtccaggccctcttccatcaataccatctcatctttcaggtccaaatcatctaacaaacctcactcggagaaagaagaacatgacaaagatagagaggctaggttggacaaggagggagatccatcagataatcgtgtgcagaccgctcagtttgattttccaaaagtgagccaattagtaacatcttcgagctgctgtgactgtatgactaaacgtctctcatctttacacttctttgatactcctgattgatagttcctggagcaactaaagtcaaagccagctgagccggtagccaaatatctgaagaggtgtgttgatgccaattcgttctttgagcctgttcataagtaggcactgccttggctaattctcaactgtggttattttccagttttctgatgaattttgcaaagaaatcgttcagcatgaatgagatgattaagctcatccatgattttcttcaagtgagaactatcttctttgagttcatatgtttgcgtgtgcgtgtgcgcgcataagttaatggattatatgcgcttcctctttgatcgtctcttgtagttcatctcggccaggatgcgagaggtacccccatggaaaggaatgagcgagctcgaatttgacactgcgctagattgtatggagaaactggtgatgaatgtcagtgtcttctctttctgctagctcgtcttggtcaacctcggagagtttctcttcttgttcttcccaaacttacctttttagcaacctcggatcacatgaaatagcgtctgcaccctttgttcgtctagctgatgccctcttcgtctgaattgatagtatgtctccgaattctaatctttgactcccacctcttgaactcgataaatatctcggattagtactttcaccccagtaatagattcttccaagcatcacatcacgacggatgaccttgagcgggacaaaatcctgcaccaacgaatcggtctctttggttggctcgaggggaaacatctagatgtgctgaatgaggatgatttggatagggatcaagttgaagggtacttaaaattcgctatggacggtaggtcaacatacctgctcttcaaaagaagggagcgcgccgtcagcgtatctcgagactatatctattttggcatttatgcatactgatttagtgtctgtcttgctttggctatctccctttgcacagaaatgattaagatgaatcactataaggtaagacgatgaacatcaaggccagatgaatctagacatacgcttatatctcactcgcttcgtccatgatctacgtctggttgaatactccatgaacacgattgttcttgtttaggccccaagagataagctgatctgcattttgaacagttgtaaggtgatattcggttagtgtggtcgtttgtctctgatcacaacgaaccaatctgaatatcgtgttattaccgggataatttggagcgaactataaaggaatgattcggcagttatcagcgaataagaattcaggaaaaaaagcggaaggttcaggagccgacactttcatcccgatactgattttggttgttctaaaggccaacccagagcatttgatttctaatgtcgagtaggtcttgtctattcttttgactacctgatgatatcggtcgagacatgatccgattctctgtcgccttgagtatgctttttgtggttctgatgccgtgttcttgaaacagatacatcaaccgattcaggagcgcttccaagctacaatcagaagcgggatactacttgtcttctctagtatgtcctatacctcatactctcatcgacatgcttgactgctcttctgatatgatctgacacacttcccttgcgtatattcttgtttcgaagatgggttcaataacgttcatagaatcgatggaccataccgttctatcaaacatcactcagcaggagttcgaaatgtgagttcggaagataatctggcgaacgactaccgtagatttgcctgacccgttcttgttggatcaatcgaaaggaacgttgaatcggccatcgcccaccttcctccaaattctcccctatctcctaccgtatcaggatttaaatcgagcatctccccattccctccccctgcctcgtcctcgtcgtcagcagtagcagcggcggcggcgtctgctcctttcggcaatacctcggaaggtgaagaaccagcaaacattatttcctttattcctaccaactttgctcttggatccaagcgattctttgccaagacgggtgaggcagtgacaagacctttgggcgcgattggaaaactatttacggatgtcatcgagggcggtctggaagacagtcggccttcctccgcatccggctctcgtccagagagacaacttggtggagggccatcggaaactcaacgtccataccagccgagaatcagatctccccgccctaggtcccatgtagacctcaactcagacccagcatcttccacaaataccaatgctgagatagaaacgtcaacaatacaaaaaccgaagcccacgcaaacattatgggatcgggtatcatccgaaattttgggatctcaatcatctcaaccacctggctggcaagagagctaccggtctcatccttctgcgaacgctcgtcctccccctcaacaacaccagcagtaccatcagcagcaactgccacatgacccgtctagaccatttgcgctcgccccaccggagaacaactattaccacaatcatccaggagaatacgtcttctctgatggaaacgttgaggaagacaacattgactacgagagactacagagcgagttggacaagagggaccaacaggcaaagtacgtcatatttcctttggtcttctcctcttcgaacttcttcgttctaaccgtcgtcttataatacaacctcttgattgggggattgcgcctatcagacaagccaatttggagacactgtctcaaatctgtgagctctcaagcctacttctcccaaagtatcaatgtctgccgatccgaagaccatttgctcacaccccaatgcttcacgtttcttccgccccggtgtgtatgtgggtatgtgacagttccttctctggacgccgaattagcggctttaatattggacaataaacagggcgacctaagtggaacgatcgacacgcttctggagatgggaagctcatgagccagacccaaataacatctctctattcttcatgtcttgatgcaggttatcttcttttgttcatatcctgatgaaatcttccatgacccgttcaaaaaaatctcttcaaatgccatgcagaacgtgaaccttagcgaacacactaaaccacatcagagatatgttcccaagacaagtaacatgacaccttgtatatttgatcaagttcagatccggaccctcgggaacgccaatcaggtcgatttcttctcgtcgagcgatctaaggtatatgtcggctttacccaaggcccagatgcagaatgagaacttgaactggataacaaaatcgatcgtgtccaagtaagcttgtattcagcctctactgcgaacatgagacgtgcactacttacgttcggatatacaatctaatttggccagataagttgaaagattgaatggataatgacatgccatgcgaattagtctttgacatgacggtctttcgtacaggaatgagggaagcttacagcgcagtttttattctttcagacatcgagagaaacaacgaaggctttattagtttgaagacaatacaatgataccaggtacagatgagaaacttacgaagataccctcgatatcttcttgtgcccaacttccattgggcaactgacggctcatgataagcttcaatgctctatcgataggcgctctgtctggatacttggctgataccaggcagagtacagcccaggaggtttgaacgacttgagaggttgaatggggacagtatacaccggtgacgcacgactaggattttgaaaatacacacacaaacaaatcgatagagggttattcgtatgagcctctgtgtttaagtaggtctttgtattctgtaaggaagactgtagagagcaaaagagctgatgtaccatgtatgtctctccccaacctccatcctccatctgcttgctcaacaaaaacgaacaagcccttcggacgctctcggagttctcaaaagtttctccagcgagtgctagagactcgagcgcgaagttggttgcatacgtgaaacagattccccatgaaccaaaccaggcaccatcttgttgctgagaggaatgaatatacccgactgctcgcttcacacaggacctattcgttgcggtggtcttcgtcagaacttgatacgcgatgctccaaggttggaaccatgaaaataacattcaagaacctactgaatctcgacttttcggtaattgggatatcgccgggagaacatctgaagggccgagagaacagacgtcgtacactccggatagttatattcggtcatgatgttacctgatcaaagaatgacagagtttgtgtcatttgacgtgatatccttcatccgtgaagcacaagctgaactatcatcaagaaaatagactcaccaaacacttcggcatggttgaaaacctcaagaatatggggagcacggatcagctcgtaactagcgaatccgccgtttgaattctgcatgaccagcaagcaatctaccgcattttcgagtctcttcgcagagacagcttccggcatggatctagatccgtttccaaatcaaacacagagagagatattccagcttatttcttctctttctatcttgtatcacggaagacgtgaaaggagatgaacgaagaactaagaactaacggtagatcttgaagtcccagaacggccttcatgccctctgccgtacagtccgagacgatatatgattgctctggggtggaaaatggccatgctccgagggttccctgtctaaaggattccttgtggtgcttcgcttaatttgtataagagagagataccatcaattattgtagaaatgatcagaccgtgctagatggattgaaaaacgaacgattcgtccgaatctgcgctttgtccagccaatcgagacatctgagcatggatgtatggttggaaggctccgtagccaattcggtttctaccaaggcttgagatatgaaggatgcgtcctgagatcgaacaacacatagtgtatggcattaagatgtgggcgcatatctcacatcaccgggtgaggtcgattagaacaacacatcttacttacccatagttgacttccactacagaaaggagaaccatagagtaaagatgtcaagcataagaaagcgtcacaaacctcaaaataagccctgaccaaatatgataagcgaacacagaaaacataactgacttggtaccacacatcatcaagccttctcggcccatccataagaaatcgtccacgacttttctatggtctttgacagcctgagaactgtttaaatgaccaacataccgcagtattggtcaaccaaagaggaacatgcattcttcttctctgatatcactgaagtaagagtccaacaaaggagaaagacacccactctggaccatcccctacaaatctagcgaccaggttgtaacatttgctgacaggtccaacagtttgacaattcgtattttcgtcctccatgaccaccatccgatagttcctttctaaggctaactttctaatccaggggaagaaccgaggaatgacgtattcgaggaaagcaagtgggtaggtcaacatctggaagactggatgatgcgggtagtataggtcgataggagagatagcgttggagagcttatggaatgggatgttctcatatgtgccaacaaagatttcctgtttggggttcgatcacgattagagaaacttatcatgtgaaacatgtcaagattattcgggacaaagaaaaggacgaacggaacgaagctcttcaatgagcggagtaacaggacactggaacctcttgccgtacaagtataccattgggaaatctgtattgaaaatgggcaggattagtgtatgagaatttgaacgtcagagcaaagcaggcataagcaatatagagactgacagaccgctcggacatgaatccaccatctccatggatggacaataagccattttggcaatagactggtatagatggaaatcgagatctcaataccgatcagaatgagaaaggaagagagaagagactaacatgagctcaggacaaatgggactgagtccttcccatttatagcaattcaatattgccactaagtgcaaaaatatgttgatgttcagtttatttggctcggtgtaagagattatcgccgacttaattcaagaaatgtatgagcagccaatatactcacgccatgctttaccccaactagggacgacttcagctccacccatctccatgagctttttcctggctttttcgcaaacagggtgtgaagacgggaggcctaagattcgaagagaaacgtaattgagcgccgttccaaacactgtcggaggagaatgggtatgtctgttgagaagtagataggcatcacaagaagcgcgcgttcgatagattagccaatttacatgcgtcccatagacagtgaagcgtgtaaagtatacatacattccccaaccgccttctttcttgtcggctctgttgcaaaggtatctgatcatctcgagtctctgttcctcctcgaggggctcggactgagtgacatagagagagattatcaatcctgatcgacagtgcccaccaagattacgtgttgtcagccggataggcagctttcatcgaactgaaatatataataaactgaccaggaatcaaaaacataggtcctccatactctccactccaatgaccatcggcagactgaatttttttgtagaactcgaatccgttctgagcggcttccagaggggttgaagctttctttaacttgggtagatcctgctcgttttaaggatcacatgtgcaaagaatcatggattgtcttgagcatctatgtttctgatttcatatttattttgaaaaatctcactgtctccaggccgagccagaacttatcctccgtggtctgaggccatgcgtcttgctcctccttcgttcgaaggtacttccattcatgtcttccatgagacccatgggacacgcgaaggcgccagttgcgtagatctgttgcctggtttggcggcggctgataagaatagtcctgaagaggtggtggtggtggtgctttctgtcgtattaaaaagagcgtattttatcaatacagagacgagtaaggagaccagtgtatcaagaagaaacgcacggccttggcctctgggttggcagacttccagatggctattcccgaccagtagataccgacagagaggattcctatgaggacaatacctgtgggcgtgtatccctctggaatcagagaggtcatggcgataatgataactctgtgtgtggatgagaggaagagattgctgggagagaaacctatccagcatcgttttatcattcgagttttgagacgatcacagaagatcgttcgaggtgactaaccgcggttcatctcggcgcccactaatcgccggccgcttgtgatgctaaacgattacctgttgactcctctagatgtagatagcttcactgtggtgatctggattatcaactctcagaagttatatgtcaggagaatgagatgatgctcgttcttgctttgttcagtagtgtttaactcgtcttcaatgtaatttttaattgagtgccagggttgagaagttcgctctcggtggcttcagtcggttgacgttctgtttattgatactcttcttctttttcaagttgaagggcggccaacaacgattttgaagcatcgcagcataccactggctagagcaagtacatgcaacatcatcccatagcatacacagagaaatgtcagtggtgtggaaaagcaaatcgtcaattcatcaagtgtagaacacgacaagccgacaaagaaacaggaaagtaggggttctagagatcgaatgaagcccaggagacgaaagctaagaataagatcaaaacgaaagagacaaattcgaagaaaaggacaagaggaagaagaagaagaagagaataagtagggtatattctggatttccatggagaaacattagttcctttgttgattagaagcggaactcgagagtactggtctagacggggagtcgaacaagcctcgagaggtttcaacccgagatttagctgcaacaaaaggccgaagcaacgaatatgtcagttacacagatccctagaacgatatcgttgagtagaaaaagatatagacacgagaatcggacaaacagtttaagacttccatgtcacggtcgatcgtaattctccttcgagcacgcgcagaagcgctgtttgacttttggtgtccatgataaggtaacggaggtggcttggctctagaaggtatataggtagatccagggctgggtctatcatatgagagtccgtcaaacccaaaattaggtgacccaggtaaagttcccaaaggttcttttgtatgacgggagcttgtgagagaaggcgaggatgggtaattgaggctagatgtcgatggagttgggctcgctacaatagattctaggcgggaatagttgtttgatcgaggaagggtgtgagctcgagtgttgtctttgttgatgacagatggtgagcgactagaaggcgtatcacaggatgagctgggtagagccacatggagttccgcaatctggaataaaagtatcgaagattctgtcagaacaagcaacaatagatggagtgaacaaattacatcagacgtgcacatacttcggtcaacttattgagtctactgtgaagctcggcaattacatcgcgctgtacgctgataattttattcactaagttacaatcccgatcaaaacatgaacatattagtcttcggcctagagcatgaccttcaagtcagatgatttacttacaatcgttcaccatctcgtctacctcgacaccccgagtgaaagaagatcttgcagagtcacggctgaatcgtttgctctccttgagcgatccgctgtaatgcaggttgagcccagaaggaatagcaggcgaatgagtgatggtattcctaccattcgaggtcgatgccgtcaagatttgagcgttgagggcattgatccgttgaaccttttcagcaacttgcgcctcaagatcggccacgatagacgctgtttgggtgtggtcattcttctctaattgaaggtctcgagacgcgagttcggcagactgtttgaagttgtccgtttcagaacgggcctccttaaggtcgcttgtcagtttgtcaaactgagataggagctcaatctgatgctttgtttggaaactgagtgactcctcaagctcgctgatcttttttgaaagactctccatctctgatcctcttgcttccttctgcgtcttcgtctgccggtccgactcctcatgcatctctctcagtagacgatgctcgttcgccaaaacgctcgcgtgagcagactcggcttcttccatcttgacctcttgctctctcatctgtcttgaatgagacttgcgctcctcgtctaactgctgttcgagcataatccgtaa

SEQ ID NO: 3084 - DNA, 8767 bp, Xanthophyllomyces dendrorhous
ctgggaaacctgggattcaagagtggcattagaggagcgaaggtcatcggaggatgttttatattcggctagttgacgtttcagctcgacctgagaggtgagaagatcctgggtttgaagaagagacgcttctctttgttggcgaacctgattgagagaaagtcgagtagaatcaagttcgagattataagcgcggtcttgatcgactagacgaagaccaagctggtcatgttccagcttgagagcgtcgtacgacttgctcagttgttggaccttctcggcattagtcgaggaagaaatttcatgagactcttccgtagcggctagtcgggagcgcaactcagtcacttcgagctcgagctttgcaattttgtcggtacatagaagtcgggattgagcggaagtctgttctaaggaagcataattggtcgaagcagtagctatctcggattcaagatcagacactttgagaagaaggtgagtgattgtagattctttctcggcaagctcatctggagtgatggtaggtggtgactttgtagatgtcatatgaaccaacaagagtcaatatgtatgcctgtgacagcaccagtagagctcaaattaaacttactagagtggtggtcttatcaatattctcctcctcttttaccggagtacttgttgagttgtccgccgtagaatcagaaaataatcctctcgcccgtcgctctttccctaaacctccaaacgaatcttcctcaacaactccaatagcactgatgtatctcttcggcgttgttggcaaatcaactgagggcattcctaaaccgaggcctgaacggggaagttcagagatccgacgtcgggtgtgaattggcaagaaatttgaggatccgaaagagggagaggatgggacggcctcgctagtcagcatgagacccgatctgagattacacagacggtgatcgacagagatgtagtgaattataaaggtcagaatttaggaagaaggaaagaagacaaatggcatatttatgatcgaacaaagacgtacaagttggtgatttgagactgaatcttggttctcaatagctgaagtttttggacctcttgctccgactatcatccagagtcgtgtggttagttcttggctttcttcgagagttcgaaccctacgcataaatcgcacaaacgatatggatagatcacatacctttattctttcttctctaagtctagctagcttttctttctccgattctaagctagcctcaccttcggtcgcttcagaatcactgtcatctgagagatcactggatcgaatacgtttcgcagaagcttgcatagaagctgcaagttttgttttaagatctgcgatttcctggaggtatacctgaattagggcattgtcgccgacaatctggagacatatgaatgaatttagaagacaaatactgttcagcgaaagggcacaaggaggttgattcatatgtggatatgaacttaccgttcctcgttcagctttagtgacgaccttagaaacccgacgagcgaatttcaaagttgctaaagacgaatcaatcgacagaacagagatcagccttaaggattggtgacggcatatgtcgatgcacatacgcaagaagcaacgtacctaatgattcatacgcgtgtatctcatctgttcagaaagtcgtagaagcgaaattcgtatcacagtcagtcaacttgatggtcgtgagaatgtcaaagaaaaagtaccgatctcttgaacgcatactcaccaagagatatcgtgcagacgacagctatcttagcatgaccggacagagaattttgaagtaaccttgtcaactttgattctcgataagcgataaacccaggcttcggttcggtaagcttttcgatcacgttggctagtgttaacagactatggattgaaaaggcaactccatttcctctgtcagctggttacactgtacgcaagaaaggtagtcaggaaatgatatgaaccttttgttgatatagcctccctcttgacggcgagtgtcatccgtggtggctctttctgaacctgccaaatcaatcagattctaaattcgtcaccagtatagccattagattcatgcttctggatgtaagaacagaaatttttaaaagcactaacaagtcgactcattcgaacgagacccatagatggggaagttttcggtcttgattgagagttagaggccatggagttcaaggaagatgaggacatggactgtgacatcgtcgatgcgtttccggattctgacaagagtcgtgactcgatgacctgcatgtttaaagtaccaaagaataaaaccatgggatatcaaaaaggactcgtttctagatgactctgtgaagaaggaatgaaagaaaacatacgactgaaaagactgtgtgggatcgagaactgtgttcgttgaaatctgtttttccgttgcgccgattgccctctccctttttcaaacaggcctgaacttcttcaggagacctgactggtactacatgagggcagtgtgcgcgatcgataagaacgatccggataaagtcaacattgtacggcaattaacttcaatcgcgcacaaaaccgggatgacgtaccttcttccaagttatcgacaatcactctcccatcccgctcatgaatcaccggaatgacctttgagttaggattgagcaggtcgcgcaacgtctcgttgtaaagctttgagggttgaatgaaccacgagatatcaatatgtaatttaatccagtgttgggcatcagaaacgaacggtgaaccgacctcaagatatgaaacgcgtagcaaaaacacgcgctctttgcactcgtcgatggcatcgaagatctggtcgatagctcgtggaatgactcctggatctccttccactcctccctgggaattgagaatgatagatagcaacatgtcaagattcgttcagaggaaaagcaatgcgtagtacagaaaggcttaccatggtgtaagtttttccggatcctgtcattccgtacgcgaacaccgttccgtcaaaaccatccactgtactggcaacgatgggtgagatgaccttgttgaacaaagcggatgtcggtgtgggcggaaggtgcagatgatctagcgcacggtgtgattaacatgattttagagatgcgacggatgaacaccagagattgggttatacaacatacctatgtgaaattctccctcgttctcccttcctttgattactccaccgcgtttcatgtttgtcggatggtgctctgctaaagaaatcgtgttggtctctgttgaacagtcatatattgaggatgttggatatggcggctttgccctgatcggtcaatatacaatatcgccatgtgtgttcaaggatgttttgtcattcaaatagctcctcacagtcgatctctacaggttgaaagcaaggattatcttgacttaccgaacgcaaaccatgactcgttccctccctcccggcttcgcctgcttcctgtttgacgcgaccccagatggcttggcagcagataagaccttcgtgctcgtcccatccaacccaccacgagccgtcttgatctgttgcatagaagccatactatgtatactggaggaaggtgtaatcgaaggagtgtcgtcggtacaggttgaacttatcgaagaacggagtgacgactcctccatgtaggggatagccaagttggaaaggctggaggttgatgatggcgcttgaatattgtccgctatcgaatagcctgacggacgaggtgttgtagaagccattgaatggcagattagtagggtgtgtaggatatgtgtgtcagtgtattaatacaggtatatgtttggccgagtagcgtcgtgagtgtgtaagtcggaggcagggttgaaggaatggacgaaagagctaagagctagttgaacaatctataaccctaacgagttaaatgatcaacgacgcgtctgttgacgcgaatgtttgtgacgcgttgaacgagccacgtggataatcttaccgagcaatgcacgtcaggaagatactactgtctctgcggtcaggttgatgatgatgatgatgatgataggatcgaaactctgaatgctatccattaccaccatccttgtattctgatcatccattaattggctaggctacatgagttcttctgataacccatagtgagttatatgcatctgtctcctagtgcacagctctcaataacttggcgcactaactaggatgaacaaactttctagttctctgaattcggcattctctccactggaagcctcagttctactggaatatgccaaactatctcaacagctgaaaaaggtccgtagttagcccaagaaacctccagtgtcctcatatgctgagttaaagaatgtctattggcaaataaagattgcatcttttaaacgacagtcaaaccctccacatgaagaagttctcttagcatttcgaggcttagagaaaaagatgggtctggttctcactttggtgcgtaaatgtttctgctcgctgaaaaaaaaccatctgttatgacttgatactcatccttcatcccttggttatatttgacgcgctcagtttaaatcctcagtatgggcggtcacgatggaccaagaggaggaattcgcccaagaggcatccctagtcaataactctgcccagctccagccggatcaataccctgtcgcctatcctcaaaggtatgacgagaatgccgaagactcgctggatgatgcagatatcaccattcaagaccaacaccaaagaggccagcaaggatggagataactatagaagccatgcagattagaagccgaagtgcggacgcatgctctcagattgaccgacatcgaatgtaattgtataatcatgacgactcccataactataatatgtaccattcaactcgctcatgactagacagctaggagagttctagaggtttgatcattctgtgttgatggttactaaccggtatcatccagacgcgttccccgcatctcgacgatctggaagattccacaggctcatctctccatcgtgtctttatgaatcgttaattttgtgtgaagtatccgttgtgtttcatcctatagcatatagccttgagggccgaatgaacttccactcggtatctgctcctctttctatgccgtttcaaaccaagagaacatactcggagtcctccctgtctccaccgtcatcagctgaagaagacgacggaatccgatcaccctcacctcctcggaaacggccgtttgtctccggttcagatccttcaaccgcccagtccgcatccgatggattctcctccttgttcatgaacggagctagaaagaggccggcttgtgactctgatcttgaaggggacgattgtgatctcgggatttcatctgacgagcaagagattactggtcagaacccatggagctcggacagtccttctggcttttcatctggaaatttaaatagccatccgtggaagacgtctccatttctaggaagcagaccggaagatggttcctctagacagcgggagcagccactaagaaaacgaaccaaacggggcttgtcggaagggttcaaccagctgggaatctcggaagatctccgaacaccgttgattgaggaggagcagccggggttcatccatccatctcaacagagcgctcaacagtttgcgttccccagagccggaaatcttggaaacaacattggcgaagtgaacaacaatgaaggagacttgcaaccgagtagtgtggttgaacccggtgaagttggtccggctgtgtggttgggtcacgcgcagaatgacgacgcatcagatgggctcagatttaccgtgttaaacgaggatgggaatgaagaaccgaaactgtctaggcagtctaatcaggaagattggaaggttggagtatggaaaggcaaaaacagagaccaaggttcgtcctttgcacgttcgtatgttttagatacatacactccttttgatggatcgttctggtctgaacagcttaactgatcttgtaggtttgacgtgtagggcccggacggttgtatgttcatccttcgtatatgaaccaacacccatcacattcttcgtatctgccgagttctcatccatgggacccaaaccaacctcataaagacatgatgtaagaccgttctcttccatatcagatattctcaagactgaccgttttgtgatctttccctgttacgttggctttcaatatccaaacagattatataacccactaaacaattcacaaaaactgcttgaaccatcgtcaccgacatcttctagatcatctttcttatcgagtaacactccaatcgacgctatgatggatactgagctgtattccaaccctaatggaccgtcatatcaacaagactggttcgggaacggcccccggtttgaggaaatcgcagacgacgaacccagtccagaggcaggaggaggaatggatattgactgagccggatcactagacaacgaaaagccttcgttctctctccaattaactcactcaacttccaattcttcaacttctacattcttgacctcactggctcggggcttctttgtcttcattcggggcaaggggcctgaagaattttgtctcaatattggtacacacaagattgagtggaaagagcgcaggacttgatacaaacccatgaagggatcgtcaccaacatcatttattgcctatcaatcatctctatcatccatcatacattatctgccactcgccgctcatcatatgatgcgcaccttcctttcctgttttcgtatcctcgcacgcgcgctctcttctccgttgtatccatctagcacacaataccccttctagtctctatcatctacacttgcatccttcctctcttcttcttaaaactagcaccctcttacatgtattcgatccctcgcacaaccttttgacattctctgagaatagaatgatgctacactctgatcgccgagatttatcagctgaggacgatggatatgcaggatgagtgaaagatgggaagaacacctgagaaaggatataggcaccccgatagataccttcttgtagtagtaagatctagaggctcgtccgtctcaggtgtacatttgagaagccttcgactcattgtcggttaacatcaacaggttgagagagcgctcctctgcaaacacatagtcagtgttgagcacaacgactaccagaccaggagatagatggaataggatgtacagagagttgttacgcgcgcataacaatagaatcactgagacgtctagatcacaagagaaactgccgggtcttccttccggtatcatatcactcgttcctattcgcctatcatgatcaaccgtttcaaggatggacgagctggtaaggaagtttgttgatctgagcagggtgcaagtcacgagacacacatggaatcctctaactgcagccatggtctatctagcccaagatgaaaatgcacgactcggctgtaaggtctagattcgacacggatacggagtctccgttgtcagcaaacaggccgtctaaactagaaagtatgcgtcagaagccggaaggccctcttcgcagtcagtgccagataaacgtcagcgaagaaccgaaggaaaagaggtgcactgtcttctttcccagtaagaaaacaggatatctcaagcttgccaacgcgaccagaccacgggctaatctctagctgacaaccaacatccaattgacatgaaacaaatgttatctccgcagatagagaagcatagatgatgagtgttggcagccagtatggtcgcccaagatttgttgtttcttagtgataacagaagtcagatctcctccatccgagggttcctgacttttgtggaaagcgaattgctgggcgagcggcctgctgcgcatttgacggcagtgggcccaaggaagacagtcaggcgtgtgtagcaacaatctagcagcagtttgtacaccaactcactcgtacgtatgaacacccgttttgtcagtttgtcgacggatggaggagagactatggcagatggatatatgcacatagtagccttacagaacgaacgaacgagaacctaacgtttgattgccgtttttcttgctttttttttctcttcgctttttatccgactgtgggaaataaattatggtcaatttttgggtacaactggaatcctcgttcaaattggaacttttcgtctggtgtctatcgttttttgccttcaaccgctctacccgtcctttcagctcaagaccagacttgtggtgagttttcggtggttttctagagtttcaggtttggattcgaatgtttgatgtgaaagaggtctaacttcatcatgcttttaacgtgttgtagtagcaatggctgttcgtatccgaaaaaaatgctggtctcatcaagttctggaaacgttggatttctgaccttgaacaaactctccactcgctgtctttcctccgatatgtttttgtggttgtctctttagcccgttcaagctccttccaccttcaagcgattcgtccaggttggccgagtcgtcctccttaacgatggaccttccaacggaaagttggccgttatcgtcgagatcattgaccacaagcgggttagtcaacaacgatgtctttagcgaaatgaaccgagatgggtttgaaggatggagaagtgaacagccggcatagaacatcaatctgaccgtctttcattttttatta

SEQ ID NO: 3085 - DNA, 20028 bp, Xanthophyllomyces dendrorhous
ccgaccctgtcttgtttgaatccccaaatccactcatcctccctgcctttctcacctccattgcttaacctgtctacactcgatgatcaccctatctccgtccttttttctgatcacttccggatccccttcgatatgttatatccccaaccgctctccaatcgtctacttgcctcgccaacaacctcatttcgaattttgaattcgactccctctctgccacgacatcctattctaaaacacgattataggctcttatcgagggatcttccaccggtgtcgtccgacaggccatctcctacaagaacttgatccttaccccttacgttcttaagagcttgccccgagctgctggacccaccgctgtcaagaaggctttcgaggcttccggtgttgccgacaagtgggctgcctccgcctgggctaagaagttggctgccaaggccaagaaggccgagtctaccgactttgagcgagtacgtgatgttcgcttttttgtgtgtggtagcatctgggtcatcagttggacgagtggtagaaggaacgaaggagagaaagatgaaatagtccaactggccaggatgttcacaacggtagtgttgaagatactgatcatacttcgctcttttcttgtatcgtctagttcgagcttatgatcctcaagaagacccgacgagatcagctcaacaaggccatctacaaggagaagaagtccgcataaacaaaccgggttttttcttttctgaggagggttttgcatttgttttttttaccatgattcgatgggtttttttttgttgtttttgggcttgttaacgcctttagccgtgcatgtcgatatctgtcaattaggtcggcaactggaagtcattttgtgcaggacttagttgatcactaacattgctgtgtcgcagaaacaacagatggtctctggcttacaacacatagagaatggagggtcagttggtatgacggatgacgaaacggcactagatggtatctcaattggatcttgcgttccgacctacagagatcgactgctcgatttttaagaagcagcggctcgttcattcgtctggatcactcgacaacgcaatccctcgtttttccgagtcctccatccaagttttgtttcacgtcacgtcagaggtcaaccccctccgattcgactctatctgataatcttttcatccgccaacgccgttcgacttcagccctagctgactggacaaataagaatacacgagtccaaagctgagtatgggctgatggtcaaacgaacggatggagagcggaggctgttggaactcctctcatccatccgttcggtattttttctgagaacgagaccgcgcgtgcatccagtctaggacgcaaggatgtacgactaaatatgacagccgaatacagttacatacaacgtcacacaaggtatagacgtcaaaaacgaagagaatgatcagaacgggcatcaattcatgacgactgttctcgtatttgaaacacgcctatgacttctatagtggtggcacgataggctatcagacctgtatgctttctttttatcttgaccctctgagagtctgatccaagtctcaaaatcggaagacagaaaggacatgcagccatctccggatggtataggagaggcaaagaaaaatccatgatagatgataagataccaacgatgaaggcacgaagtgaacaggccaatgaaagaatacccagttaaaagatcaattcataatacggggatgaagatagaggatgagaggccaaagaatagactacaatgtgataaagatggaggagaagggaagagagatccggacgtgaaaattgcaaagtctagcttatgattagaacccgcgatacccggtctgctgctgctgctgataaggattgaatccagtggactgaggccccatgaagcctgttgcctgaggttgcatgaactgctgttgttgtagaggaggctgcatgcccattcctcccatagggtaacctacaaagatcgagaaaataagggaaaagaaaaacaggtcaaaacatattcggtttggtatgctggtttagagtgagacaactcaccagtagcttgaggctgcataaacccagtctgctgtggctgctgcatcatcatccctgggaaacccgtcacctgaggtcggagagcgtcatatttatctgtttgatggaccacaaacgagtgatcgtttagacttgcagtagggatacatctttatgagaatgaaagctcaccggaagattgaggagcggcactagcatccagcacacccttgttgttcttcatcgcagcaaacacgttagacggattgaagctttgctgttgtgattgaggcgttggctggacacgagcggacgcaagcgcgttaaactggtcggcagaggacagcgcgtttgcgtttgcattgacctgaccttgttgatagttggagttcataccggtcatttctgtacacaaagaagtatttggtatcggacggtcagagtttcaccaaagacactaccctttatagaacgatgtcagccatctccgaagtgaaagacgtacgaggcatgaatccaccacttggttgataaccagtcatctgagtctgttggaagccggttggctgctgctgctggaaaccagtaggctgttgttgttggaaaccagtgggttgttgctgttgatatccagtcatctgaggctgctgttgctggaatggcgacgtgctctgttgaggtcgcgtcggaatgaattgtccaaagccagtggccgtggggatcaacggattgagcaacccctggttctgaggaacaggtgccaaaggacctcgcggtcctgtctgttgaggctgctgttgctgctggaaagctccggtttgttgactctggagcaattgacccatcggagcaggcgaaccggagaaccctaaaccattgtggaagctctgggggacacttgtaggctgaggggcagggctaccaccggagccaatagacaagttgctcattcctgtagtgagaggttgttggataggcgctgagggaggtcgggcctgtccaatctgagctaggaagtcgaacgcgctagaagcaccttgggtagcaggctggataggaggagcgactgatacaggggcctggattggaggagcaacgggcgtgggcgtagtaggcttggcagagctcggccgaggagtccacgcatcatcatcaaagccatttacagcaggaacacttttaggcgctggttcaacaacaggcggagatggtgctggagagacaaccacgggtggcgcgggtgaggggttctcccgaagaagatcgccagccgtagcaatgcttgtcgcatcgactgatgaggtcgtcgatttcctttccggccgtcctctcctggtctgatttttcagactaccgtccgaactagtaaagagactggcagagttgttcgttgtagccgctgaaggactgcttacccggccagactgctcctcctgttgtagtcgcctggcgagtgcctcatcgctttcaatttgcttctttgtttccttatctttaggagggtttctggccgagattgcttttctgacacggatgacgtcaccttctcggagtccaagagatcgcaaggtggaagcgtccaaatcaggcaagatcgtggtatcaattttgtcacgctcaaaggcggcagcgtatcgggtgcagtcgtccatgtcacaaccagcattaaggaagaactcgaaccagtcgattgttggcttcttgacgggtgtcgggcgagactgagactgagactgagccgacgaggaaggacgactggaagaggaagtatctcggctgacgctgctagtaggtcgagacttgtggggatgggattgagcaagagggagatcatcttcgttcatcgcagggtgagcgggtcttcggtccattcctcggtcgatatattcccggtcctcgggcgacatcttctccagcgggacctcgataacgactccattgagcttatgtaaccggatcttgccctctttgagtccaagaaactcggcttcaactttgaactgtcctgatttgtcatgccaagttcgaactcggttggccgagggtcctgacacaatcaacgaatgaccaatgttgagtcagcatagggcgcttccagagaggggcgtagaagtacttacgagatcttccggacgaactagccttctgaggtcgatcaggcatgcttctgtctttgggaatagggatgtctcggttaacggcctccgaatgagaaggtctagacctgatttgaggaggctggggagcgccttgctgtctagcccgttgtcgtctaatgaaatgaaatgaaatgaaaattttaagtaatagagttaacagtaagctcgatgagtatggacgaggtcatatacggttgtcaccgtgcagaaaaagaatgatacgtactcggccgcctcatcctcccttctcatcttttcttcgaccttctgtctcctcctatcctcttgttctcttctgaccctcctggcttcagcttcttgagcggcctcagcctcctctctctctctccttctttgagccttggcgttcgcttccgcttcggcctcggctgcctcccttgccgcgctctctctctcctccgcctcgtaatcttctgctgaattacccaccgagttgtctacccctgctgagccgacctcgacatactgcgcgggtacaacaccttcctcgcctcgctcgttccggaccttccaccaatcctcggcactctggtccagaatgactaggttctcaccctccgtcaaattaagctcgtcctctccttgagcttcgaaatcatacaaggcaaccgcggcggccgcgtccgaattttcagctgggtgggattctgtgatcgggctggaggcccaacgaacgttcttggtcgacgtcgacgtagtgagctgaggtaatgtaggcggagcaccgatgatgggctcatcaacggctgagaaggcgcctcctgagagatctttagaggtacgaagcttagagacgatctcatctgtctcatctcgagagctggaatgaaagttgagtggggcggcgaggccggtgatatgcagtgataaatctttgtggtcgtgggtgacagaggtaacggcagagatgggatgttgttggataggggtctaagagagttcggttcagttgcccgatcgtcattactgtcaaatacgaaatgactctgacttactttatctgattcgcttgcaaagaagatggcaccattaccgacgcccaaggttccctttttcttctttttcttatcgtcaagttcctgtttgagattcgtttcttggcatcagcttgtattccgatcggtgaatatgatacatcttcagacaatatcacgtactgagaccacccaagtctgaatcgcgtcagctttagccttgttccggctggcggctgccagttctgctggatcggtatacgcagccgcaggttccgttggggactcggtctttggaatgcagcaagaagtatagatgaaaccgagtgagcctttcctatactcgtgctttcttgctataagtgcctcaaaaggatgacgtaagcttacttctgcagagactcctccgaacgcgtcgctttctcctgtgccctcttcctcctgaacatatgaagccgggacatatccgagtttgttcgcgtctgattgaagctttaccaagagccactcgtcatccttttcgaatacctggagcgggtcgtcctcgttcatcgtaagttcctcatcgttggtggctgcgtatgcgtagatcgctcgagcaagatagaggggagacatctaaatggaagaaacaggaatcgcagtaaccgacagaaggtcttagcatgatctacatagagaaaacgacacacaggccagaacgatggaacataaagacgagcgaacctcttcaacgtaattggacgggactagtccgaccgctccttcctcttcactagcctgatcgagttttacctttgctttccaccatctaccagaaaagtttcatttaaaacgcgtacaagaaggttatccagaagcagacaagaacggttgaatgaagaagaaggaaggatgtagagaaacgttccaaccgagttgtcaacctagtgcttctcagtcaacatagcgggaacgaaagactgactgatcgtcctccttgtcgatgatataaagctcctgatcctcggccaacgcgagctctgtttccggatcctgaggcgtatagtcgtatagggctttgtacaggccaaacatctgggacagacttgactcgagatgggatgtatagaggaagagatgggaaagtgaagggaaaaggcgaccagaagaaaaagccacgcgggattgagaacgataagcgtctgttagggttagctcactctagtagcatcatagccgtcggaccgtgagagtgtggatctggtacacctagcatacagcatacagcaatcagcaatcagcaatcaacagtcagcaatcaacatgggtctactctctatattcaagtccaaaaagtcctcggtgagtgctggtagccgggaaggatcaccagggaaacagagattgaccttttttcgatcgatttcataggagggatcaaacgatcaggccgctacatctacatcggcgtaagaccgtttacctctccggctcagagtgacctgtttttgcggttgatcaagcgtttcatacatgcatggcgttctcaggataactcagaaagggcaggccggacagttgtggtgcgctcggtatcactctgaactctccatttggcggcttgtactgaaactgtcaactacctagctacttttctatccagataaatggcgagcctgcaggaaacatcgtctttgtaagcacccatactccttctgatttgagacagaaatcgtttgatgactcgggtgaatctccattctgctctgaatcgacagaaactgtatgatgatgtggtccccaagactgctcggaacttcagagagctctgtaccggtcaaaatgggtttggctacaaactctccgggtcagtccattcatgctcgtccagcttcaatcactcagacacgaccgacatgacatattgatcaaaatcgacatcactcgtccattcgaccttctagttttcaccgaatcatccctggtttcatgcttcaaggtggtgactttactaggtatatccatcgccgtcattcttgatatccgtgtttcccagcgctgactcgcaggaacaatccatgtacgcgttttgcctaggcacgatgggacaggtggaaagtccatctatcctggacgaggaggaaaattcgaggatgagaacgtaggtgttgagcgcttatcgttcgacatgaactcagattgaacgcgccgtctctattcttgtctttctgatcatcagttcgtcgtcagacacaccaagcctggacttctctctagtatgttatttgcttccatcctgtctatcaaccagtttcgtgatgaaaaaaaaagaagcttacctagacgactatgggtccttgtataaactagtggccaatgccggaccggcgacgaacggttctcaattctttatcaccgtagccagtacaccccatctcgagtaagtgggccgtgcatcatcgtaatcagaaacatcaaccccctacaagagaaagctgacctttgttcttggtcaaacgactttatccgggggaaatcgtatcggaaaacgtccttagcgggaaacacgtggtatgtgtttctcgtctcttgatctgcgcggcgtacacatatgacgatgagagaaagctgaccaggctgacaatctttctgataatgcggtctaggtctttggtgaagtcatagaagggtgggtagaacatcatgcgagacgatcaagtatttgacaaaactggacaaggctgattttgttgttctgctctgccatcctgccttctatccattctccttctgggtggccataaagtatggaacttgttcgacagatcgaaacactaggatcctcatctggtaaaccgaaagccaaagtcgggattgcctcctccggagtcgtcatctctggagatgattccgattcggactagagaacctgctgtcggacggaaatcgtataggagtttgaagagggaagcatgtactacgtattgacaaatctccttccagattttccgttgtcagatgtgtcttttgtatatcaatgcacccaacaggccttattcgtcagatctagaagtcacgtccatctctactaagctatgctacatttcttcaactactcgggaagcatcttcaacccgaagagttatcagaagacccctccaaaaaaaaatcacacgttcataccccgcttctacactcaagccttggaagccctcttggcgatagcctcgtcaacagcggccctgatctggttgatgacatcctttgagtcctttgctccaaagatggccgaaccggcaacgatgacgttcgaaccggcgtcggcgcaaacgtggatggtggcaggtccaacaccaccgtcgacctgaatatccttgttagggtaaagctctcggagggtagtcacctgtacgcgcgcagagaaagagagagatgatatgtcaacaaccccacccacaaagagaacatgatcagagatcattgagaagagtcataatggacgagacatgtctgatataaacataccttgggaagacactcagccataaacttctgacctccctttcctttgaaccatcaatgtgtttgacaccagataatatatcaggaatcctatttgttatcaacaatgtaccaagtcagaacgtaccagggtgcacagtcataaccaagatcatatcagccgcatcagcaatctccttggtgatcacctcagccggggtatcgggagagattgcgattccagccttcattccagcgtcatgaatctgcttgatgatcttgatgtgatcctcttttgtgttcaatcaacgaccgcacgcgtgcccagattcaaaagggaaaacaggttaggcgatgagtctaaagtttgaaactcgagattttaaacaaggaaactgttgaagtaaaacgcactggtggcctcgtagtggaaggtgtacaactttcctccggcggcagcgacgtccgaaacccactgcgggataacacacgtaccatagaacataggcgttcaataaagggacaataaaatgggaatgaagagtcgacatctacaaaaaggacatcgcttactcgttcgggatcagcgaccatcatatggcagtccataaagatatctgggatggcctgcttcacgcaagtcagaataggggcgcctaccagaccaacaaaatttcacggacagcttggaattagtacctcttgtccaaaacaggtcttattgaggagccagaattgagttgcacaaagaaatatcgaacgaacccatagtgatattgggaacaaagtgtccgtccataatatctattgaaatgaagagaacacgaaacccaagatcagcaagcccagacgtcataagagaaaggaggaaaaaaaaagaggacccgtagaagagttatgaacatacccatgtgaagccagtcagctccatccttgatcattcggctgcactcgaaagtgagctttccaaagtcagaagcaaggaccgaaggagagatgatgctgtttggatagatgtttcaagggaactatgacgtgagacaagaagagaacaggagcgagaaacgtccaaaagaaacgctaatcaagagaaagagaagagataaataccttttgagagtcatatttatgcgcccgagttgatttgcagaaaatgtgagagagaagaaaggattacagatgatacccaacaaaatgaaaagatggtcgataggaaagaaggaaagattcgttcacggaaaaagtcgagtgatagataaatatatcgtcaggcttgcatcagcctcaaactcaagtgaaaaagatcatatattcaaccgtctagagtatcgtacaccacacaagtggaaacagaagagaaagaacatagtgtcgttcgttagaccaaagtctttgacatgtaaaccccgtcgagctcgtatcccaaacgtcgatagtaatccctggttccgataccggcgatgactgcaatcttccaactatcgtgttcctctcgggctatacgttctgcctcttccatcaagagtgttccgataccctggtgttggaatttctttgggtttcgaccatgcactccgatagccgttccatagacatgcaactctcggaccattgaggcgcccatgccttcgggtccgttgaccaactctttcctaaatgttccctcctccgaacactttctcaaccgaagaagaccgacaaggacgtcttgttcagcgtcttcataagacaagaaggtctcccaacctccattggcagcgtaatctcttcggatcaactcgaggtggtaaggccggactttgtggtgaatctcgtgaatctgaggtgtcaaggaggcagttgttcagtagtgatagctgaagaggcagaaaaaggaagggttcggtcaaagtgatgaaatttgtactgactccgacctctcggtatctaacgtccctgcattctgctccaaaatccttcattcgacccaacgccagctctctcaagtttccgttttcgactcccgaactgacaagcggcatggggatatccctctgaactcggtaaactctcgtccaagggggaacgagcgccatgattcgagcaacgatatcgactagcgcattcggggtatagttcttgtatttgcccgtcttccagagttcatacaacccggttcctcggatgacgagtgtcggatagagcttgagtccgtccgtcctgtacgctggattctcgaagaattcctataagcgagttgacgcaaagggagcaaaaactcattaataccatgttcagagtactgcgtggtaaacgagtgactgaccttgaactgggccatatctcgctcaacacctgttggcacgatttaaaacagaacaacaatatgtgtcaaccaaatagtcagagcaagataagggggttgtcccatcttattgggagagggacaaagggggctttcccgataactaaccgacgttaggaagatcgggcatcatatgggcaacaatcttgtaaccggcatccttggacatatggaaggactctgtcacagctttcacggtgtgcccactgaaagtttcacgcgcagcatcgagaacaaatcacgtctctgatcagataaaccaggaccaaaagaagaaaaggctaggagaagataagcgcgtaccgattggtgtctcgagccacatcctcgtaaacagactgaactccgatctcgagtcgagtgcatccgtaccgcagcatttgacttttgataccatgttcagagcaacataaacaagagtaagatcaaagagatcagaaaacacacgatggagataggcatgtgtaagcgcgcgcaacattcatattaaagcaccataaacacacgaacctcaaatgcggcctgagacagtaatccggacgagtctcgatcgtaataccaacacatttcgtcttgctctgctccgagaaccgaacggcttcatcaacatctgttccagtgaatccggagagcgcattgtgtagctgagcgacgaaaaagtgtcgatacgactcgggcatggacatgaatgttcctcccatgatactggaattgatttataaattcccacaggtttaggtaccaaattaagagacgcgcacagaaagaaagagcaaataactgcagacgtacatgatctcgaccttttcaacattgtgtcccaaacttttcagttggtccactctacctttgcactgctcgtaaggatcgtatctggcctgtggggcgataaatcatatggtcagttcttgccttgacaattctgtgggagcaagaaagaaggaaagaaagataaactcactcgaatagctcgcatggaggtaggctcgtatccagtgtacgactgggtagagtactcaaagtccgagtctggtcctccaggacagtagacacagatgtttccagtcatagcgacgtgaggacatcggtgaggtttgcacatgacggccacgacggcaatctaagtcgatcgaggaaaaaaataccaaagataccgaattcagccagggagacagagggtataaggatcatagtggagttgagagatcactgacacctagtgaggttggtaacagacgacgagcaccaaagtttgtagaccagcaatacgttaaattatcaatttcctatgttccaaaatacattctgtagagaaaagggaatcaagaagattcgacgaaccactagctgtcctgacgggtttaatggtgatctttcctccaaggatcgtcttccactcctcaggaacagccgccaggatatccattaatcgagggagctgcttgagcccgtttgccttcgagatctttgcccgaatggtattaagggagatatctgccggcggcttcttggaggtctgtgcagctaggacctgctctttatggttgttaataagggcattgacgatagctgtacacacgagaaggtgaagctctggttgggaagggcctagagagaagaggtaagaggaggtagagcaagcgtggttagattgagccagagtttgggacagacatgaaagaaacggaaccaggatcaagaagacagactcacctgcttggacgaccatggctgcgagcaaagatctggtctccgaaggaagagagtgaggacgaggttggatgtgttgagtagtttggtgctgctgaaggaaggactgaattccttccctaccaaatgctaatggctaattgggtagccttgcagggaggtcgtaacatttgggcctggttacggcgccgcaacacgtgcttacccaaaaggctgaacaaatctacgcgaaccacgacttgcctctgtgatcgttgaagctatgcccgcgggtcgcaaatcatttgttgcacctccacaccgtgaaaccttacaaaatcttccgtcctgggcaaccaggacatcaataatatcgaatacaatacagagaagattagcattgcccctgcataaggatgacacgattcgatcagagtggagaccttcgggtcaaattatttttttctttcgtatgtctatatctgttgagttgtgtactttttatgtatacatcgaggatatgaacttatgggacgtcatcatctgagctctgtattgataaacattttgatatatatgggtactttccttgtgacacattgtagcagagaacaccatgtatatgaacatggatgattcagttgattagaggaacctggcaaaggcaagggtaaacaatatcacaaccagcgccgtacatcgtccaaaccaatggtgagaccggagtcctcacaaaccggagggagactctggaatatgtgtgtgttgggttgagggttgagccaaatcacgtgactgcacttcttgctagttggctcgacgctcatccaattatctcaacagtcagcctcatcaattctggatgcacaccagatgaacgtcgagctcctttctcccttcctccaggactttccagatgcaatcacaaccactctggatgattcagccatctgttccagattcaatcatgctggagtctttgctggctccttcattgcctctggcagagcggacggagctgtctgcgtttgggacgtcgagaccaaacgtccagtttggatcgaacaaggccacgcagagtctgtagaaaccgtttggttcgtccaggtttagtatcgtgatttgagattgagagatcctgcaaccactaatctttgccccgcgatgatcctattggctgtagttggtcgaggaactcaaggtttctcctcacttcatctagagacgcgacatgcatcatctgggatctagaaacaggcgaccgaaaacaagtcatccggttcaaagctcccgttctgggcgcgttctttcatcctcacaactcgttcgtatccttccttgacgcgtattcgtcctttttccagagtagctgacatgaagctgtcggtttgatccctcgttttaccctgatcatgttcggtccttcagacagatcttcctagcaacgctgtccactcatgagacatacttagtcgacctccgcccctcctcaagaggtagatacgagctttttgacacagatacatccgacccaacgtacagctcaagtacaaacggccagtcagatgaaaaaggaaagggaaaagatattagaaaaacctctgggtttgtggtcgctaagttctcacccgatggaagaaagatctttcttggtaccagatcaggagagttgatcgtgatggatggagagactagactggtcagtcatccctcttcagcttatttttacactctcaatttgattcagaaagagctcatactctacaatatgtctcatcataacaggtagaaactcgaacgaagttatgcaacgcgataatcaaaagcatggagtttgacctctccggtcggtgagctctctctgtccgctttccttctttctgtcatccaacttctatcgctctgcttactcagtgcgcataaatcgaactgaacgtaaacagtaatttagtgatcaactcgtccgatcgagcagtgagagtcctctcagtcgctcccgtttacccagaagatccgcgctcggtgtttcgagtcgagcttctccatcggtttcaagatacaatcaatcgaacgccatggtgtggagttgggttctctggagacggagaatatgtctttggaggttcgttcagcctttagacgcccttttgtgtcgacgccatcctctcaagctctgacatcatgcgtccctccttcgtgcacttcttcggataaaaaaggcgcgggtcatagaatatctcatgatatatacatatgggatcgatctagcgggacgctcgtcaaagtactcgaaggtcccaaacaacctctcgatgacgttcatgtttgtccatcttctctctttttctctctcattagttcactcggcgacttaatcggctgactcggaaaaaaatcataaccgaataataatcaatagtggcatcccaccaaaccagtgatcgcctctgtatcaagcttgggatcgatccatctctgggtaaccgcacaagctgacacatggagcgcatttgcacctgggtttgaagagttggaggagaatgcgatctatgcggagaaagaggatgaattcgatgtggttcgtcgcctgttttcctcattcgactacctatcattagggctaaatttagttctctactcatctctttctctcgctattggtggtgatgaacaccaatacaggaagacgaatcatccctccttcgtcgtaagcttcaagaagaagacaacccgatagacattctgcatcggtctcctctcttcgcatcaatcacattacctgatccaccgcctcttctgaccttaccctctaatgacccagtcagagcaaaatccgaatctcctacaacaggttggtggtgggatattgaaccggatgaggacacaaagctcgattggttcatgcctcttaggctggatgagaacggaagggtgcttagggttgatatggacttcttctaaaaacaaaaaaaccaccaaccaaccccagttctgatataatgatgcgctgtttgtacaaccagtcatagactcaccattgtcttcagacttactcgcctttattgtaaaaactcgacataatattgttcttggtaatacaacgtgagagcaaagaaaaaagaagacatgacaaggggaacatatgggcaggatggttcaacatatagttgttgaagtggtgtcgatttaccagaaagcacctgttatcggacgtacaagagagaaggaaaatagtaagaacggcttgatgtgacgggtgcaggaagcaatatcatacgtacaccatccgatgaagcattgacaaagattctccatgctggtagcttgttgaatcagttttcgtacttgttcgtcgactggtagaacctgaggtggtctgagatctcggccctctcgacctacgaagaacatcgtacacagaatggtaagaaactccgtgcatcacaaatgatggcatgagtcagacccgaaagggtatacataccgaaatctcgtccggtgagtttatcttggatacgctggatgaccttgacggcatgagcattttgaatctcttttccatcagcgcctatggaccaaacacaatcaatgaatcatagtcagccagagaccgagtcaaacaaccagcatctatgagcttacctcgaagcatctcgttctcctctccacgtcgtctgttacctggtccgcctccgaaagcgcctcgatctggatccatgtctactccatcatgcaatcaacgtcgaacccggtcagtatgaaacagacatagtacaatagacgcaacaagggcaaaccttcaggagcggcggcaggttcatccggagtcaatgctaatctccagatgaacaaagggtcgtagacgaatgcctccaacacagccataagagactccttgttgtctcgcatgacgcgcatgacaatctcgcaacttcgactgtaagctccatacacaccgcagatctgcacggatacaaaagaaaacgctctagtcagatctcaaggtttgctataacatccatgcgggagcagacaggagatgaccaacctccatggcatttgtcaacattcttgtcagacggaagggaatcttctccggaaatttgtctcggtgcatcgtgatttcgaaacaatcaccctggacaaatcaacaagaaacaacgtcagaaggcccttgtttgcgaataaaaataaaaataaaaataagattgagtgctcggacttacaaaatcgatgtgtacaatctttccagacaccctgtccaaaagcagatttgaggggtgtcgatctcccagtcccaaaatataaccgaccatacttgttgaagcgagagatcggatataggttgttcgtctctcaacccatgactcggagtttcgactcttgagccacagcactctatatagatcttgaccagtcgtattctcgagagcatactcgaagacctcaaccttttgcatcagagtcaggtagtcatagtcgggtgccatctaagtgaaagtggatacatgcgatatggttttattcagtggacgtcatggggatgccaacgttgaacgaagacacaaacctgaagaatgagtcggtgctcaatgtttaaaaggatcttccgtgattctcggtagtccttgatgagaacgtgcatagtatctgtatcttgaacccatccgatgagaccggaattcggcgataggggcgtgatcgagtagctttggatgtgcagatgtcgcttgaaactttctggatcatgagagagaagagtgttgaccagaccgaagagttgcatgaccctctcatcttgtcgaagatcctcgtgacctaaagagaaaagacggtttcgatttaattgcaaatatatgaattagataaacactagtgattactgtacctttcaacacaaactggtacgcctttccatctccgccattcactgttaatcgtctagggcgttgcttagaagtgatgacggtgaacgtaggcacaaagctgacgatcctgactactggttttccacttcgataagtacctacagggagtcaaataaaatgtcagtcatcgtgctgactcaaaaggtacaagattacttaccaggaacagccaactccagatctcgaacttttaacagtttcggcgaaacgtactgcagctctagtgtcggcagttgggataattgcttcgagagcttcttgaaaacctgttgaagaggaagattcataagtttctggaaattactgcttcgtcacagctctgtacgaaccatatagtagatatcccatgcagaactcaagtcgttcgcatctccgtgctgcctataacgtctacagaagtctcttgcaacggatagatcatggctgaagctttggatgaaagactgttcgcgcagagtttcagcgccctgtatataagagaagcaaatcaaaattcagtattgatggtcatcctcaacgtgtatacaaatcatttaccttatcgatcatttcatgaagcggttctaaagtgttgaacatgccctgaggattctgctcagcaaagtagaacctcgacgcttcttcaagaccctcaacccataactcatgccagaggattgctactcggataagctcgtgactgacaagtgacgcctacattacgattaaacgaacattcgtcagcagtcattcatagcatacggggcaggacacaaatatggtagtttacctgatcaacgagcagtggactgtgatctctcatctggttcatgatggcgtaggcgccttctgtacgagccagcaccgtcgatttggaggctacaaggagcgggtaaatcaaggcttgaggatgagctcgaccgacggagttgagtagctgctcaattgcgtttcgaactagtgaattggggttgttgattcgagcaatgatctgttggtatcgatacaccgacaataagcgaagaattctcttaaactctacagcttagcagaaagaatatttacctgaggaataacctccaaccagacatcaatgctgacgcttgaggcacccttcgtgatagccatgttcaccgactcgtggaaaccatagttgaaccaaagagtaagcagtcgaagagtgtcctgaagggagtttcccttcaaaagagcaaccgaccgatagaatcctgtttcggagaagacgtcagctaaactttctgtgagaccgaggatcgaatatcattttcgagacctaccttggacagccggaaccacatagttagcgaatacatcggactgtatcagatcaggctgagtttcaaatcgttggataatctcgaaacaccgaagtgaaaattcgtgccaggccttataccagtcagagtctagctgggttgcacgcttatacaatttgagaatatcgacattgtcggtctacggagcgaagcgacgacaagagtcagcaatctcgaaccatgatacatagtactcgatttcacttacgggaatccaatcatctttcagggcaacctcccattctccctgtttcaaataacatctagcaagaagctgagtgaactctgatcgagcttccggaggaattaccatatctggagtatcgagacccagatctgaggtaagcttagtagtaaacgactgaagccataacaatgtatcctgcttagaaccctgggcccaagtgtatttgaagtatgcgtatactacatgaggaggtgcttgaagagcctgcacgatgaacgaatattatgttcaacatactacacaagatcagatgacggacatgtcgaaataacttaccccatctccatctccattctcttgaggacctaatagcgaactaagtgtcttctcggccaagcccaaacggtcggactttcgacaaagattggcgaatttgatccacatgtctttatcttgactcggcgtgagcacgagacttcgaactgatagcactcgttgccagatctcaacatcttgctcgcagcctttcagtctattgggggcgaacagaaataatccatgtaagctccttcctctgaatgattgaatgcacagtcttaccttcgcatccaggttctgcgcatagaagcctgtcgttgaggttgatctgcagattgcttgtacgtgatgatctcttctagttctgagagcatctgaatccgaatgagtacactgtagaaccaattcgcgatgaaattagcgtttttaatttacaatatttataaatgattgacaatctagaatacacgaacttatacgctcgagcataactctcgttaaacaacgaacagagctccggatctgcaccctctcgagac

SEQ ID NO: 3086 - DNA, 75644 bp, Xanthophyllomyces dendrorhous
gtttcacctgagcgaccggtctctatcgctgtcaccggccgaccgttcatctttcggtcttctgcgccttctatggatctgccgtccacagagagcgagaaacattatctgtcgtcctcgtttgtctcgagatggaactgctcgctcgacctgactcatcttgacacaggtctcgtcaacaagcggatctctgttcctgctcttgctggacttgctcaacctcggggtataggtcttggccgaccttctgtcggtctcggtgggggtggccatcaggtggcgggaaatagacgatatagtatagctaacttggcttcactcgctcaatccggtcgaaatcattctagttctagtcacaaccctaatcagcttcaacaacatcacccagctctaccgagtataaactcgcttccgacgattttaccaacacctcctcaggcttttccacccattcagcagattgacacgtccttagcttcggggtctgcttcgatcaacggaatgaaagaacctttggccacaccagcgtttccttcctacccggctcatgaccgacagcaaagacagccatctggaatcttgccaccttcgcagttagcgtttgttaattctagaactagtgcgccagcagtgagtacagcagaaggaggaggaagaggagggcacgggacgcaatacgaggaggaagggctgttggtatctgtcaacgtacacacgccttatggtgcttcttctgatcggaatcacggggagaacggcgaggaagcaagagacgaggagagaagggatcgacggacggtccggccgctcgaaccgttcacgcttgaggtttttgtgttcaacaaatctgaccgaatcagacggttcgttgtcggcgtgccggagaaacggcgaggacgattggctgggcctgcggaggtgcaaggtcattcgggagaaactggaggagatggagatgtagaggacggccggatgggaatctctcgtatgtatttctctctttctctctctttctggttaatgctctctgtatatatttctgtttctgactggatctattgctttctgcctggatagaactgcgatcacgtctagccgaacatttatcgtcaacaacgccgttgattccactggagaacaacatccgagtcggaccacttctacctcggtcatcacagagtgtacggatgaaatttttggcgttgacggaaggcgttcactcggtggacacattggcaatcattggtatcggagattcgtttgctgtgaatctaaagcgagtttttctttcatcttgcaaaccaaggttccccctttccatgttggaacatgcttgactaacgcaaaatatcttatcttttgacgaacgcatcagatcggtttgtaacatcatagtcagacgataaagcagaccgtgttgatctatttttttcttgcaagacgtatagatgtacgctttcttttgcttgtgctcacaaaagtgaccgaaagccgggcccagacttctgacagaataccggattaagcgactaaaatggcttatcgagaacagaccacagataagagcaacatcgaagtttctcttggcataaacgacactccggtggaaccttctgtataccacacagtcccggttacgaccgagagcaagcaatagaggcaacaagcgggatgaaaagttcatcgatcggtctctatagaagactttcttgttttcttggtcttggaactcttatcgatcaactcttttttcttacgacatctacgattcctgccccaaactcttggaatttcattgatacacacgtctctcttcccgaggacatcgcatgtgagcaaatttccgcaaacaaagaacatagaaccctgagagataggtgatgtgcatgatatctatcgcttgagtcttgtcatccttcggaggagttagatcgggtcgtgtgagtggaagacacaaagcaggagatccaaagatccaacagcacggggtaaggttcaataaccataacagcagacagagagagagtgtgtgtgtacgtgtgtatgcgtaagatacccggtcaccacgaggtcgcttttcgacgatccgcattggcgtttgaattcggtccgccgttgtgggctgtaatgaaaacctgagatagaatagatgaatgattatgaaattcagatatgaattcaaatctaatccccaccgccaactccaccgccgaaaatctctcgggtcatctgctcggctttttcatttttttggtcgtacaaacacaaaaagctaagagaccgtcaagagaatcttctttctatttctttttctctccgtgtccttctctccttctctccctcgtcttggatttcgtcctcgttgtcacttctgtcacccacccaatcacccatcttgttatccatcatgacggatatcacgcccgccacaccggttctgaccgagaagcaggtactccctccgacctcggattcacccgctgactatacctccggacgctcggatacctaccctgaacgagagagtgacgacaactctgtcgacaaggaagtcatcaagaccggccagacccttacagatgttcaggccgcacatgagatttctgaggattctgcccaggttaatctttctattcttcttgtttgatcctgctcgtatctcagcccagagtatcggggataacccaaacggttctccgtttttttatgtgccttctctgctactgctcttgttcataacctcgcctctaccaggtcgcagagaacaaatggagacgacacatggcatggaaaagacttcgatatgttgtccttcccgcctttgctctcctcgtcttgggttgtgagtcgatttatttctattttttctttcttttcccttctattcttctgttagcttcctttggaaaatattcctttccatgttcaccagatgtgcataccttcttgcgcttctctttctttatactaatctcttccatcctcttctctacctcgtacttctcttctcttcttagggtggatcgcttctatcgttgtcaaggataccagacaccggtggatccagtcgaccatcttggcgtggtggattatcggtcttgttatcgttcgtcctctcagtctttttttccctcttactaccgacctcgtctctttccgacaaaactcatattttatctttggaggttgctcatacagttcagattcgtgccctcgtccgttgtcggccggcctatcggcaaagtctggacaagtacgtttatccatttgccgctcaccatgccgcagcgcgtatttatctctatccgaaagacttgttggctaatgtctagctacctcggtatttttcattcttgtttttgatacctgactattattagctttaatctccaacccgttcttcaagcttaaccgaatcgcccgactcgccatcggctggcttattctccttggccttctctttggatcctgctatgggttccctcttccggaaggaacttcctacgggcagcgaacgatctctgtctttggtctcctcgttctcaactgcttgtactttgtttgctctcgaaaccgaaagctcatcaaatggtcagtttccatactctgttttgtcgcttgtgtagttcaacgagctcacgctgatgtgatgtgatgttatgctctgggacccaaaaactcttgtaggcacaccgttgtcgttggtctcatcatccaacaggcgatcgccatctttgtgctcaagtccgaggctggtcttgatctcttccagtggatcggtatgtactcgttcgaaggcccaaaaccatgtctttctgtctttacagcactaatcttgtctttcctgatttttctctactcccgcgcctcaagccaccgctgccgctgatttcttgcaccagggtggagtggctgccacatttttcttcgagtcttccttcagcagctacttctttgtcggtgtcctcggagccgttgtattcttcatcgccttcgttcagatgatgttctatcttggagctatggtaagtcaaagtctgattcccatatctattctctcgctcggccgttgtgttgatccagcctaatacatttccaatgattcacagacctgggtcgtccgaaagttcgcttggatcttcttccgagctatggatgtctctggagcagaggccgttattgctgctgcttcccctttcatcggtcagggtgaaagtgcctgtctagtcaagccctttgttgatcttatgactccttccgagcttcacttggccatgacctctggtttctctagtatgtttccatatttggtttcttcctgtgcgatgccacggtttactaacgtgtctttgattcaatcgtatcccagccatctctggatccgtgttgactggttacatccttctcagtattcctccttcggctttgattactgcatccgtcatgtcgatccccgcctccatcgccatctccaagattgtttaccctgaagacgacactccggtgacgctcggtcgaatcgtcgtcgaccgaggagacgaggatcatgaaagcgaggccaatgcccttcatgctttctccaacggagcttggttcggtctcaaggtagctggtttgatcttgtgtaacgtcttggtcgtccttgcccttctttacgttgtcgacggtcttttgacctggatcggaaaggctttcaccatcaacgccctcacccttgagctcatcttccaatacatcttctacccgctttcgtggctcatgggagtccccaaggccgactgtcttcttgtgtctcagttgttgggtctcaagctgttcggtaacgagtttgtcgcctacagcaagctcatgaccgagatcaacgccggttaccccatcaccgctcgaggaaggacaattgccaacttctgtctcgccggatttgcaaacctcggttccttgggtatccagattggtgtcatctctggtttggcaccatcgagagcaaagatcattgctaccatcgctccttccgctttgatctttggtttcttgtcgacctgccagacggctaccatcgccggtatgcttacttgaagatagtgaaaagtcgatcgatcgggcgagcgggtcgtttcatagctggtcttcacaatcgtgcccactagagaccatacgcttgtcttttcctcttcgtttctttaccttatcctacctttattctcttctctactttttctttcttttcatcgttttatcactcttctttcctgttttgcttagctaaaaaaaaaccccattcatcggtctattgacggttgacgttccttccgtcgaattcctttccttcgtcttttcgttattctttttcatattttgctttcgttgcttttggtgactttctcatgattggtctttcattgtacttgggtttccgctccctttctcgttccttctcattcactctcatttccgccttcctccttgtatcctatacctacaatcctctacattttcaaatatactgtgccctaactgctcttcttagtcagggggtttctcacctctttctcaattctctggattaaacggatgattgtttctgaatagacttcccatcgatccttttctctggacagggcgaacaagagaaatccaacacgacaagcaagagagaaacaaaacaaaacaaaacaaaaacgaagacgttaaacaaaaccatgaggactggacacggcaaggtccctagttcaaatagggaaccctcttccacaacatcctaacaaacccatccagaccattccgacgccttcaccctcggcccctcctccttcaccagaaccaacgatctgaccggtctctttcaagacgatgtctggcgattcgggtgattcctccttttggataagtgcgagtgaggggtgaagaggttgagtaggccgagcggacaggagcgaccgattcgttagatgggctgaagtgacgtgatgagagctgattgaaaacgaagtgtttcgatcgatacgagaatgcgaagatttagcgcgcactcatggagaaggattcaaccaagataagatatcagatcttacagaggaagaaataggtttgcctggccgattggtttcttggtcgatggattcaactgaccagtgttgaactcatcacacatgtctacagccgttctgtacgtacccgatgttcttttgacagatatcgccgatacatgatcagatttatctcccaagctcagaaccagatccagaaggaatagtatatcaaaagaagatgaactcacccctggaggacacaagaactccacacgtaccgctcagcgaccatcagctcttccgtcccttccatgcgctttctgaaccctgcatcgattccaccaggatatgactcgtcattaggcgtcttcagtaattctttcagtatctctgacgtccccataggtggaatagagggtagtgaggcttgggccgaagtatcagaagggacttcaagtcgagcggagagatggagtttacggatgaacgcagtccagtctggtcggagaggagaagtcgatgtattttccaaaggagcaggcgccgtggtcaaggcagaaggcaaggttcctagaggttcaccagtcttttcgtggcaaccaagggaatccgttagataagacttagctgataaagagaaaggaagagggaagatcaacttatggtccgtaccgcttctagtatcatccatgtcgtagttccatcgacctttccatgccctcttgttctgacagtgaccttccaaaatccaacgacctctttttcgatcttgatgaccttgcccaatcctccgttacgaatcgatcgactgccttccataaccccactgagcgcagtgtgtagcctcgacaagacaaatcggatggccagacgtaaaccctcaggatcaccataaatctgtcggtcaatggcatcaaacgccccttctgagtaactctgattgatcaagagttcggcatcgccagcacgattcgaggaagagtatagttggtgagtacgccacgcatgtcctagccagctagactgaacgagcttgtatcgtgctcgaagttcagcgcgacgagcccgatagtaaggccataggttggaggatgaagaatcgacctggcggtgagagagaagtgcagtggtcaatgatccagggaagtcccgcctgacatggtggaaggctgacaagtagactacacaacaaaagaaaaatcgtttgataagcccgttgacatgtaatcgtttcggctcaaggaggaaaatcaacttactggcataccggcctagctttcctgtctgggcaacatttgtcctctcggctgtgcctagttcagagaaagctaaggcgagaacgtgtattctcctccggagacgataagacggaggaagtgagattggcttgacggttgataaataggtgtctaagtgtgcgaccggaaaggtcagagacgtaggtgctgttggcggaggcgaacaaagaagagaatcaaggactaccaacgctgtaattggggctgaaactgaaattggagctggagctggagctgaagttgaggtgattggcgatgcaggcttggactgtgaagcatgattgggaactaaaggcgctttgaactttttgaattttctagatactatttgtggcataggtgcagggaccggaaccgaaggcaaaggtggcggagagtttggagtagcgcaaacagctttaatcataacctctgctttaggtttgagaggactgattagtcttgcggtaggcaccgaggcaaagggtatatgcgtttcattcgaatctggccgagagtcgatggtgagtgtatgctctggactgaagctgacaggagtcaaagagggaggagccgttgtgttcaaagacaggaccttcacgatttgacttttgggctccttgggtttctttattttcttcttgattggcttcggcgttgggtcgaaagttggagccgcagaagcgtcactgtctgttgtcataaaccctttcgcttgaagggaaagatcggcttctatcctgggaggcacggcaagcgaagcttctttcctggccttcttttgacgaggaactgtatgcggcgacggcgaacgatgggtagacttacgggagacaggtatatgctgaatggacgctgcttcttgtggttgcgcaagaggtgacggaatagcagattcaacaagaggagcggacgctggttttgagccacctgtagtcaagaagtactcaaccagcttggctacgaggagaggcttgttgagcttggagtatcccgacagggatagctggatacatcagacgacacgataaaatcacatcagcgtggttcagccctacatggacagaagcagatctacttacctctttgcactttgccttgagagccggaatattcaacttagaaagggtcgcctcgtccatgtggagtgaatgttagattgtcctgagagatcaggaatcgaagatgaaaagaaagaaggacaggaggaagaaagaagcagaaaggagaaaaagtgtcagcgatagaaagctgtcagtctacgacaccacgagaaccgatttctggtcagtatacagctctctagtcagtcatcaatctggtgctccttgtactctcttgggtgtgtatacatgtacatctgatcatgtagcatcatgaattctgtgaaagaaaagaacgagttgatgatggatgatggatgactatgaacgaggtggccgcatggacacagcttcaccaacgacaaatcacccagtcgtcaatccacgcgatcgttcatccatctcatcttctttgtttctctatcccaccaactccatccttccgattctctattctctctattctatcctactatgaccactcctgcagaattccttacctatgtcgatgagcacgctgaacagttcatcgacagattagccaaggccgtcgcaatccctgtgcgttccttcttctctttcttcctctttcgatctctctcggagatgtgcgaaactccgactttcttccatacttttctcttcctctcctctttgctgcttctttctcttggtcatggccggaaacatcacttctctcaaagtgaaacgataatgctaactggagaatcttgtcgttcctttctcatgcgcctagtctgtctctggcgaagcttcgtacaggtgagaatcctcgccttgtgtcttgattttttcctgggctcatcctttccactgtatctcttgtttgcattatagaaagcatgtctttgagatggccgactttatggcctctcagctcgagtctctaggatgtgacattgtcaagaaggttcctcttggcgagcaagttctagagggccagactttgcagcttcctcctgccgtcctggcttctttgggagacgaccccaagaagaagactattctcttgtatggtcggtacctgttttcttaccgtgcatacactccagttaggctgctccgttgactcattaattctttctatccctcttgatcgacaggacactacggtttgtcctgatgacactaaatacttcctctgacaattggcattaactgctcgactttggtttcttagatgtccaaccagccttagtatccggtaagtcccaaacgagattatattatcctgaagatagtcccaatacttgtctcatctcattggatgttactccctatccttagatggatgggacaccgatcctttcgtcctcactcctcacgaagatggtcgactgattggccgaggatctagcgatgacaaggggcctgtacgttctcttctctctccccctctcactgctcatatatcactcacttcttcttgcaatgcatgaaatatgatatcgtgaaagatactcggctggttaaatgtaattgaggcgcacaaaaacctcggtctcgagctccctgtaaacttgaagatgtgtttcgagggtatggaggagtccggatccgagggattggatgagctaatcgagaaggagaaggacggattcttcaaaggtgtcgacgcatgctgtatctcgtaggctctgttctctttcttcaagtagtccatctgattttggcgctcattgatcatggtttaatcttctaatctgcgtctccgatcctcctcatattagagacaactactggctcaatacgaccacccctgcgctcacgtacggtcttcgaggaatcgcatacttcggccttaaagtcagcggacctgcccgggatcttcattccggagttttcggaggtgtcgtgcatgagcccagttcgtactttatgttttctacccagcgttcatacagactgtccatcatcatactgatatcttgagttctcatactgaccaactctttgaacaaaaaagtgaccgatctcatccacctcctctccaccctcgtccagccatccggtaagatcaccatccccggtctctctgatctggtcgctcctctgacagaccaggagcgaaagcgatacgaagctattcacttcgaaacggctgatatcgaagcttcgaccggaagcaagacggccatcagtgaggataaggttgagagcttgatggccaagatgagggagccaagtttgagtctgcatggaatcgagggagcattctactcgcccggatccaagacagtaattcctgccgtgagtgtatcggtttgattttcgaaggcgatatagctgtttgctcttgttctctttatattcatattgcgtatccttcctgataactatgccctaattcgaatcccgttgactagacggttgttggtaagttgcatacgtcaattcttatacattcaattgaagtcggctggattcccggcgttctaattcgtcctctcgtcctcaggaaaattctctattcgacttgttcccgacatgatgcgtgagtaccctcatcttatcttgtttcaactagtatctttgcgggcagtctgaaccatgaccgatatgcttgtttaaatcagccgaggaggtgacccgacttgtgactacccatattcagtctgaattcaagaaactcaactccaagaacaccgttcgtccccctactcttggcttttatcaatctcgcttgcatcggaaagaacgatcatgtgggatgacgaaaagagtaaccttgccatctttaccattattggtcctgtagatcgagattgacatgggtcatggtggaaagccttggggttcgttttactcttatctccttagttgcccttatctatttcgatttgcgcatctgatcaatttttttaaaccttaatataaacttgcgaccacagtcgcggatcctgaacactggaactaccgagccgctttcaaaggtacgtttatcaggagatgaaatttgtgaatagcatgtacggatgatatccaacgtagattaaccactttgtcttctttcgtgtccttccatatgtcgtgatctttatcattgttgcaaataatcaagctactgagacggtctacaaacagaaacccgatcttactcgagaaggttcggccatgttcccttccatctttctgtcaatctctaatcgaatagaggctgatcttgctcgtatctcgcgttcttatctctgtcgtttataggtggttccattcctgtcacactttcttttgccgatgcgctcaaaatcaacgtgcgtgcccatcttatctctctctctcttttccttacttgtgggaacgtggtaaagctcatctgtgattaatcgatatcaacctgtcgggttccacaaccgataggtccttctgctgcctatgggccgaggagacgatggcgctcactctatcaacgagaagctcgaccgatcaaactacatcaacggagtacgtctatgttctctttttctcgttcataacgtctctcggactcatgtaattctgttcctgttttggtgaatcacgacagaccaaggtgttgggtgcctacctccacgaaatcgctgcagtcaccaagtgatctttgtctactctgccgtatctctttcgtttcttccttactaccctttcatcgcaaatgcctttgcttattcgatgaaagttttagagatgttcaagcacaaatgagaaggggaaagaggaatagatgaaacgaaaggacagagaacgacatgattatatgatcacccgtttcctcttcttttgaccttcctcgatctttgctcttactttttcctcgtccattccctctgtctcccagaaggaagctgtcttgtcactctcgacctgtcgttggaggaatttgagcgcagcaagattatagccaacggtttctttctgtcgtcgaagagccgaacgaaggtacgttcggagagagatgatcgtaggtcgcatcacgttattggaaacaatctgagcatgatgggttcgaagtaggaatagaaggatcctagaaaggagcgaagtgttccattcctttttttttttgccacaaagaacgcacacgcacacgataaaagaaaccgattgtcaggatcaaagaacatgtagtccaaaagcgggaagaaaaaacggatagacataccttctgtgcccagtagctcaagcactgaagcatcgaagtcacatacctaaacggcagtacaaccaatgcatcggtcaacgaggcattcgggatcttctctaccactttcaacacgttctcttctggatcgatatcccccattgctttcaataacgggttcttctccggcggctgcaattggtctccagcggctgaaccggcaagggtctttttagcatcaaggtaatcttgataggtcaacctttcttcgtccgcgagatcgagagcttccatgatcttctctccggccataagagtatccgacgtctgcttggtcacctcggtagcttcggcagtttctgcaccctgggcttcgtggtcggctgttcggttaagactttcagccaggttggcatcgaacagtctgtccgtctctttctcgcgctcttcgtccaaaaagagctgaagcatcaaaaagatgatagcagccataaaagagtttagttcagcgtttttgatatctgacaagaaaaagaaggaagagacgtatagaggtgaagaggagagaaagaagaagacgtaccggctcatcggtcttttcccaaactcgaatggatcgatcgtgagaaccggtaacaacaaacttcccttgtttacttgtcgccagagcccagacctcaccgtggtgaccttcgagtttctggatcatttcaaactattagagatttggacattcattcggtcagtcgagtggtcagtttttgttcttggaaacagagcagagaaagcagatgtcaagagaacagaagattgggagaacatactttgtcaccatcccagtacttgacagctcggtcttttccaaccgaccaaaagtagtgaccctcattctcgaattgtactgccatcacactctcttcgtgtgcgtagatcgacttgtggcaatctccgaagtcaagtccccaaatcttgatgtttttgtcagcagaagatgtgatgagcaactttgaatcggctgagacgtccatagagagtacaggtagcttgtgaccgtagagcgagaggaaaaacttgagagtgtcctggtagaacactttgacggtggcgtctaacagagcgatcgcgaggaactttccatctggggtatatctcactgaaagaacgtcgtccgtcatcttgagagtcctggtgtgaacgatggtgagaaccttgttcttgaattttcgctcgttacccattcggtcgacgaccgtctgggacacgtcctccatctcgaccaactcgaaatcccaaaacttgacgtccttgtctgcacttccagagacgagacccttcccgtcgggtctgacttgaatcgaccagattgcagcggtatgggcctgggtctcagaaatcagggtggacgaggagacatcataaaggaggagtgtgccggctttggtgccgacgatgatatgtcggtctccaggaagccaggtgagacagatcgcatacccggtttccatcgtcctcacacaagccagcgtcttcaagttccaaatcttgacctgtccgttcgatccactagccaccaggtcatctccaccagagatgtctagacatctgatatccgcacggtgaccgggcagatcgattcctgctataagatttgactcgggagtgacgtctttcgagggttttccggtggagggagggagaggaacataatgagttgagactgcgtttgacgcgttgtggatcaagaccgtcagctggggtttgactgaggatgaagaggcagcggcagtttcctcggtatcgggggaaaacgagaaggatttgatctttgaggacgagtggatttgacaccacagcacaaatttgtctccccaggtcgttaccttctcctctcccttgtcctcgtcatcggcagcagcggcagcgccgtccttcttcttttcacgttctcgcttctttcgccgagctttcttcttgtcgacctcagcatctgttcgaattcggagagcagagaccgtcttgtcggaggtaaggacgaaaagcaggggtgaggttgggtggtaggccaagttggttatcggcgaagacgacgtcggcaacggcacagacgacaacgggtggatgagcacggggagctcgccgtcatcagcctccttgataccatgaacgaggctctgttcgttgataacccatcctttgacctctccttcctgactgcctgtagcaacttcccactgtccaaacaacttgcctttctcctcgccgtcctcgccaatcacagcgtcttcacctggaggaataaacctgaccgaagcggcgctgacgcctgctcggtgagcgaccacagtttggatgcaatggctggtctggagatcccaaagtttgagcaacgtgtcgagagaggtcgatatcaagtatccagggtggtttgataccgtcgggtgaggcaagaaggtcagtgagcttatgggggatcggtgagagtgaagtcggacgattcctctttcgtcttcgacgtcccagatgacgatttcgccttcggttccaccagaggccagtcggccgcctcgatggtcccagctcatcgcggtaacagactttttgtgaccgttgaagcaaacgatctcggtggcttctcgctcctggctgctcgtcgagggagggaatgaccacagacggacggatccgtcctggtaaccgactgcgtatagtggggaggacgatgaggaggaggaggatactgtcgagttggagctggcgattctggtgactggcgatgtatgagaaggtgaatgccacatagatacctgtgtataaaatgaaactctggtgagtgtttccctcgtacaaagaggactgaatgtgttcaagcatggtggcttctgtagttgctactcaccagcttggctgtctttacatgccatactaggatatcttccaaagcgggaacataggcgagtttcccatcgaacagagagtttccctgaggggaggcaataagaccgaaagcctgtgttggctcgtgtctgagatatgagcggaccatgattgcccaggctgaggtgactggttggaatgatttctgatgatttactggagagaagcaggccgtaaatttgggtacaacttttttgtttaagatagatgaaagatagatgaattgaagttagattagaatattttctattcaaactcttggttcagactacgacgatttgtagtccatccggctgcccgtccgtgagtgggatcgaccataccagatcggaagcaccattcactcaacgagtctctcttgatggaccgtgatgctgaccaatgaggctctctgacagaagcactctagagctctgtggatgagaaccatagaggcgcaagaacaacgaaagactctgtggtttgtagcaaagtctttatcttttgattgcaaactacaaagatgacgtaatagaaacgtttgactgcaatagaaaaagactagaaaacttttgtaatcgaaatcggccaaatactacagaaaaaggcctaatgaaaatcgctgcaaacaatagaaaacttgtctaatagaaccgccaagaagactaggaatatttaccaataagcgaattctcaactcagccgccgttccttcctcgccttcttcgttctcgttccccgtccgttttgctctcgtcattgatcctcatccttttgctttctctcttctcttcttgttcttgttcggtcttgcttagagagtgtctgcaactcgttggctctctttcaagtctgttgatcacactcgttttgtcgtcatcagttctcacacaactctctgcctgctctcgttcaaccaccatcctcgtttttgggcagactcagctctccctatctttgaatgttctcatttgcagaggatgatccgagacagaagttgagtgtagcgataggatacatgtccattgcctgctggtatgttttctgcgtgttctctttcctgtttagacatacctttcctcttcactctgttggttgaaagaacatgtttctttgtttgttctttcttctctatctgtctttcgtgtctcgtgatctcaacctcgaatacacacacatgtatccaggctttgggctcaattcccacagatttaccagaactacaaggtcaagagctgtgagggacttgcgctgccattcttattgaactgggcattcggtaggtgtcctcatatatgtcctcctctatcaactatgtctttcgggcgctcagaccttctccttgtttggatgttcttatcaggtgatttaacgaacttgataggatgtgtgctcaccgaccagctagagttccaggtacataattcttgtcttcatctcagctcaggaagaacttcgcgatagagaggaatgggtttactgtgaatacagagtcatctctccggaacctgagaacatcctgaacctcctttccaatcatctcgcccataacgccttatcttaatttcttaccccggaatgcttttcttcttcttcttttctttctgtgtttgcctatctacagaaatatctcgccttctacttcgtcttcgtggacgccaccctcttggcccagtttttccattacaagcgagttcgcacgcctcctcgtcaaggcccttcatcttcctatcttcctacaacagcgtcgaccgctgtcgccccttataaccatcaacgatcctcctcgtatctcgactcatctcgtggacccgactttggctctcccaaagagcttggaacacatgtctcggtcgccaggagtcattctaaccatcgacgaaggggttacgcgacctacgacgagatgagcgcggccgctgccaacgtggcccgagctgcagaagctgttgctgcttccagacgagcgaacggaggtgtgaaccgaagtaaatcgcggacgggcaagaaagaaggccgtcggtctcgttcgaacaaacaactaggtgctttagacagtgatgaccaagatctgtcgacgcatggtttgcaaacaagtgtaaccagtctaggaggccagagtatccggtcggatacctctaggacgtcctccattctcagacactcgggtgtctcaaagaggacccatctttcgggttctatcacctcggcagcttctcagactagtgatcgatcttcgagtcaaagcttgtccgcgcccaattcccctttaccatcgcccgctcggtcacctacaattctcaagccgtcactcccatcctcggttaccaaccagtcgaactcaccgtcatcgaccgaacgaggcagatcgcttactcggccgggcgcgctcgtgtttgaccttcatccgccgacgcccgaaagcgcgagtccatatctggatgaagcgatgaggctcgaaggtcagtttcaataccgtgagctggggctgagacctaatcatccaggtagaagcatcagcagagaccccaaggcgagtcaccatcaatccagcaccggagggaacgcccgaagacatgctgcagctgccggagtcgtgctgatgggcttagggacgttcttcagtgttcgtgggatgggattggagttggtttcagcaccgggttcggtaggatatggcagtttggtgggttcctcaataggacatgttctaccagaggagcgagaaagcggaagggtgctctggaatacaggtcgctcggtcgcgcatgagactcgatccgattcatcagcgagcaattcagatagtgttcttgtagagtttttgaacgttcccgaaggagattcggtctacgatgtacctgccgttgaagaccctgtgaagactggcagcgagcaagacgatgaagatgatgaaagaggagataaagaggaaaacaagtctagcagccaaccgggaggtcatcgaccgactgccccaccgttctcatggcgaagagcgatcgggaggatgagcgcttggtcgtgtacggtgctttatctaacatcaagaatgcctcagatatggaaaaatgtgagtgccactttttctccttctgttgtggttcgtcaggaaccgtgtggatgaattgaaccggtcgacatcattttcacattggataaactcagttcacaagaaagtctattgaagggctctctatcttgttgtttgtcgccgccttttgtggaaacgtacgtccatattcctcttgtcttcttcttctctcttgcgtacgctaaagtacgcgcacatgctcaacatcttttgtttgcaaattatggtttcctcagtctttctatgtgctatcgatcgtatcgaacccgatgatgcatcgaccccgcccagaagggacagaattcttacttgagagtttgccttacctcgtcggaagcgggggcacactcatctttgacgtgacgattatgatccaggcaatcatctacggctcggccccgcctcttcctgacacacctccaccgtgggctcggaaaccatcgacaacgtcgcatcgtcgagctatcattccctacgggcacgctcacggatactcctcccattccagggggcattccaacgtgccgaacgacgagatggagaatgcccctttactccacgagagtcctatcgaggactcgttccctgctttcgcaggatcagcagatataggaggtggacgaaggtcgccttcgacgatgagatcgccaatgataccgaggcagagatcgttaagttcgagcaccggcatcaagtccaggggcgagtcgttgtacccttctggtaggcgacctttaagccgagcgggatctacccgggctggccaaactggcattgatggcggtggtgttgccagtgtgggacgaatagacgcaacttcagtagtagcggtgggagctggagccggagccggagccgagggacatcctccttctggattgtacgaacctccgcagaaacgtaatagacatcggtccacttcaggaggaaccgcgtcgaagagtatatctttcctagaggaagatagggccgaagtttcatctccgtcggccccatcgtcaccgacaatagcactacagaatcaaagtttgagcatggagacgtctgagaaggggggcggcccaactggttgaatgggaaaatggaagtgggggcggaacgtgaactgtcggaaccaagcatcttttcttttactcactattcttatttcaaatcaacagacgaccagttttctctttaacgtgtgaatcgtctttttaaatcttattgtgcatggattagcaagctcttctatggcaaagcaagtacgagaggcaaaaacttgaaaccccattactgtacaacaagacccgcagaggcagggtaagaagaaacgtttaatatgtgaacggaaattgaacggtcgtcatggcaacttgatcatccagcgtcattgactttgaacactgtgttctcctctatactttgcccttctacactcacccaagtccactcttcttgttgttctctttctgtcatggcatcaaataaaccctcgctcccggtgactcaacgtcaacctccaccaccaggagcccctcagcctcgagggccaaacaggtaagatacccttgtccgcctgccttgctgtttgttatgtaaaccgcctcggcttgtttgaactttcggttgctgatcgcttagatattctttccataccctttatatctactgtccatagatctacgaaagcaagtcaaaagctcaaggtgcactaaaccctctttctctctcatggcattctggttgaggacgagaaactaacgacgaattaatggaattggccttactcttggcactggttaaggtcttgccggacgagcctgaaacgctacctcctcaacctacaaaagtcttcaaggccgaaaaacctcctaccggagaggaaggagacgacgacgatgagagtgaaagtgaggatgatgatttggacgaggacgatgatgatggtgttcaggtgagtttgtcctctcttgccgctcatgtatatgcctatctgtttgtgaagagtaagtcgatagattcaatgaactgactctcttgaggattatctcgtgctcgattgatcatccttacaggtctataaacaactggctcaaatcccggctggttcagctagaagggatgcaatgaggcttacccggaaagagaaagctcggttacccagggtcacagcttactgtgttgcgacgtaagtgttttatcctgtcatatcgcttggatctatgatcgagtggtcttgttcgagacctaccgagctttatgagtctcagcttcctaaactgtcccttctgtgtccatctggaatttcaatcctatcaagatcatatcggttaccggctgtgtttgagcatctgaaatcccgtagggccacacatgacaccaaccctgttcaatttgacgaagcgatctacacatcctacaccgttcctgctcctccttcttcgtctccttcaaacgcctctacaagaggagggtccaatctgaatcccgcaaatcaccatcatggctcaagctcgaacactggtaggttgatcgacatcgaagaggaaacctcatcggccaatggcgaaaactctcagaccgatggtcctcccggtgaaacctccagtaaagaagagaccgatcagaggaagaagaaaaggaaatcacgatttgcagtcgatagtgaatatagtggagacgaacaggcaccgaacaaacagttcggtcaggatggccagggcagagtgaccaaagcagacgtgtttgtgttcgagtacggaactggtaggtcgaagattttgcctcctcaggtctgatagacgctttcataacagctgactgaaagaagtttttttttcctcttcatgaatagtcgtcatctggggtatgactcaagagcaggagaagcggttcatctcttcgttgtaagtcattccgcgacgtctgctccgagaattcctttccatgtatcctcgcgcaaaaaaactctgggagactgacatgtattctctctgtcagaaaacgatatgaggtcgaacgactttctccagatgatatcgagatggaagacctcaacttttactatgccaactattccaggtacgtaccactcaagaaaggtttttttctttgtctctatcgacgtctactaatctactccttatgcttgtgtacacagaatatataacgacgttattgctctcagaaaagggtcttcatatatgtaagcaagagaagtcaggttctatctaccttgcgtatatcctgtcctactgattacatacatttcttcgaaccgattaggacaaagctttcgctctctcatgctctcgctcagtccgtcaaactatctttcttcgaaggagcagtatccaacacaatcgaagagacgaaggatattcctcaaaacatttccgaaacaggaaagattaaagtatgtgctccgagtgaccatttgttgtgtatactgatatcacaacatctatcaattcctgacttcttctctgatttgtgtctgtatatgtagatgcctcgaaaggagatcatgaagcagatcggtcgacttttccttctaagagtcaacatcagtcttgtcggttcctcttttgttgattcgcccgagttgttctggacgttcccagatttagaaccattatactcgttagcatttatattcgcctcccttttttgtctgaggaacaaggatgttgatattgattctgttccgtgacgatatatttgtagcgctggagtattctacctggaagtcccccaacggctaaaagtcattaatggtcgagttgatgttctgcaagatatgctcagacttctcaaggtttgtcttttgtcttgaaactttcttaccatgaaatatggatggcctgctcaacttgaaattgccacaattttgaatataggaatcggtaaacagcgctcacggcgaaggtttagaacgaattgtcatctggctcatcgtcgtcagtcttcttctttctgagattttcttctgtctgtttatcttcgtctaacgctcttcaccttctctctctttcctgttgttgctggtatgattgatcgctgatggtttacagctcgagatcatcttgggattgacgacgattatggtcgacttgtttgtctaaaacgggtccgatccctcttagcttcaaggtttatgtatccccgataaatgttgtttttttatcgtcgctctgttttctcgttcatctcgatgtaagtgagtaacgaagagaactaggctagcattactcagtttgatatgattacatagtggacgggatacatgttgagagaagtgagtacacggtcgagtttagattactcggaactgtggtcgattggcgtggtgttatgagaaagcgagaataagtttctgatgtctcgctcgatagagaaacccggtctggagtcctctgtaggtagaccagagagagagggcaatcggaaacgaaagaacgaaccatgttgttcttcacatgtgtcttcaacccggtccaagccccatcctccgtactcaacgtcgactgtccaccatccctatccaacaacttttgcatcatctctgcgtctctctccgctatcgttcgttttccctttccttgtgctccttcctctgtctgagagtcttttgacgtttgggtgatcccaggtggtgctggcggctgtagtgatgacgggagagatgtggcatgtgaggtgaggggctggttggtagatgtcttgtcgatcggagtaggtccttcagaagtttctttcatcgacttggtcgtaggagatccttctatccctgtttgtactggagcagaatcagaagatgagaacgatttgaaccggccggaagggagagtgaatcgtaagtgtgcaaaaggaggagcgaggccaagggatggtctgattcggaaggattgcttcaaggctcgtgtgagctgcataactacaagtctcttttgacgggtggaagatcactaccgatcccaagaggtttgttattctttcgtccgtcttcttgttattatcacttaattctcaaccgatatgtctggagagaatcggctgttttaacaagcaagaaagaagatgagaagtggggtgtctaggtcaagtttgagtagactttccgaagatggagaacctagacggctcgtatgacgtcagtcaagacagctcttttgatgtatctcctttttgggatttcttggttctatttctcctcttctgatgtcgattgatcgctctgaagagatcaagatactctggcacccattcgcaaacggtcgaaggcctttttaacatgaaaacagtgtttcaaaggaagactccgaagagaagaaaggggaattgtagtagaaagaagaaaagaagaaacgccaatcacggcaagggaacatgtcgtagatgaaacagtgatgatgaagggccagaaaggaagggcacggtgcaaatgtaaggaagcgacaaatataaaaacaagattggagcagacgaaaccaaagagaaatacatcgaagtgaagctagaagaagaaaagcaaaacagaagaaggaacaaacaaccttaagagatagaaaaaggagaagaagaaaagagagggagggaaacccaaatactcaaaaggagaaagggaggataacttatgttcttggttctggtgtttcctcttcattctctggctcaaagccgtcttcggactcttcatcaagagtattcagactaggcggtcgggtgatggcgtcttcgaagacatcgtgaacaactcgatggacggccaccagtccacccatcactataacaacgacagcagaagcatagtacagattagtagaatgacacctaaagcgtgtatattcagagagagtaggaacagtaggcgcacaaagagcagggccaacaaggtgttccattagccgtctggctagggagagtcggcctcgatcggtatcagcagctgtatagtttgagaggtgaaagcgccatggaaaggaagagagatacaaaagaaagacatgtcccaaaacatgagcccgacatacacaccggtcgactagtagtcaaagaaaggacaggggtacgaacgaatcgaggtgaacagtggtgtgatgacaacaaggacgagggtcaagagaagaacaatggtgtagttgagctgtgcaggtgcataggaatgcggctcccgattgaccagttggaagatgagggcaaactggaagagaaagagaagatggtaagaaggaggctcggcttatagcaagggacgcacagagtcaaggtacgtacgaggattgttgggatggtgacaactttcaatagccaactggagtacggacaggatattatcaaacgttggatgagtatcgatggtatgtgtcaagaaatatcaggcatatgaactctgagaagaagacggaaaggactgggcttctgtaatacgtacaacttgggttcatgctggtaaggctcttgaaggatggaagacacgatgctgaaagtgttgattccgaacagaacgatcgtcaagactggtccaatgagagtgagagtaagattgataagtcatcactcgttcgctggcttcactgtttataaaccggcgggagggtgtaaggtgaaaggatacacaaaaatagcttgcaaacgtacatatcaggtatcctcttgcccaggtgtcccattcatacttttgtttcttgtactgaacaccatcgagcaggtatgtcagctcggttctcctttcggcatctagtaccttgagtgaccgtctgcttcggaacatgacgatcgcccaagaggccaggagaaccacaatgatagcagtgagggtgagaaaagaggaaacgaatccggtcggaggaggcgggtgtggaagattcatgacgactgcttgggctgctattcacttaatgtccagcgagagggaaaaactgttgatcgaatcgaggtcttttgccagtgaacagccagatcttcgtggtcgcgctcgactttgtctaccgggtaagtatccctggcaagaaaggcagacgatgcacgaccgtttgatcttcttcaggtggaagttgaaagtcaagaaggaggaaagttgacgagtcgcgtggacggcaaagtttttgctgcgcccacgtggaaaggctgcatcttcagcgttcaatgcatcggacgcagtctaacagatgcctctagatacacctatgatgatgtagtcgttgtaggttcacttgagggtgtctgatctgatgggagggagggacgaaatcattgagaagacaggcaggcggcgctatgatatcagctaacgattgagaattcgtacgagagcagggatttggtgcagactatgaatgaggcatagggtgagtcgttggctcggtcgtcgcatctatctcttgaccttgattcagagatacctccaagaacagatccatcggacatcaaacagttgtatagcaactgtttcttccttccaacatccagtgcaaagttccatatatgttgttctggtatgagcgtatgctttatccgactctttcctctccccacgcgcgcatgcagactgtcttccaacattcgtacgacaacggaccaaggcaagtcatgctttgccaagagcatctactgagttgcgctcctatgctcctcccaccttctctcctttcttcctgagtcgtgcgcgtatgtctgtgatgtcttgatcggtcgaggccatcctatccaagccacagtcgggtttgccctctggctgttagggttacgaccgcagtcaggcttcattatagccggcgctttacaacaacttctttaccccaatcgtcttcactgccatcgaccatcagacgttggtgttggactcttggactctatcactagctcacacacccacacaatatgcctccaaggaggacatcgttcacatctaccgtcaactctagaaacggattcgctccctcggcggatgtggcttcctacaaggatctcttgctgtttgaggaacgactcaaacagaacgcagctctgcttcgtagcagaaaacggaagtatgaaagtgagtgccaatattcagaaacaagcaggacatgtgcagagcagagcgctaggtgatggctggttatgtgtaagtgtttgcgcgaaggctgattgtgcttgctctcggttcgttcactctgtgcgtctgttcccgtcgtgctctggatcatagtcttcctcgctattcttgtggtctccattctagtgcttgtccacaaatctttcttgcagccttcacctgtaagtcgcttgctaccgatgtgactctctgtcagtctgcgtttgggagttcgtggaattgatctgtcctttcggaatactccttcaccatcttagacaccctcactgcactatctacatctctcgttactaccggtagcagtagtgacactcctgttgttctttgcgagcgggatgtacgccgaacgaataggatacgccaaccggtttgtgcttgactttcggtctgactcctcagttgtatcgatcacctcataccaaatcgattgtctcccgcttctaaacagttacgttccccatgctaacagagcacttcgatcgctaaacatgcaccttaatatgcgtgtctcccccaagccgctgatcccatatattcccttcccgctctctcttcttgtgccttcctctttgtcttcttctgccacatcgcccagtccaagatctccgtcgatatcacccacgacgctaccgagctcgagcaagtctcagaagcctgccagcggaccgaacccgaagccaatcccggcgatcccaccaacaaagaatcccagaggagagctcatcttctctagtagagtcgatcgggtctttagggatggatacgagcgatacagagcgctgtttgaaaagaaacgagaggaacgatacagagagctccgagctaggaagaagggcctcaccgggatttggtggaagtaggtgttggtttcagttcaacgtcctctagtttgcccggctggtatacaatctgttgatacttccctactcttcattgcggactgttgtcaatcgtaggctactcggctaccggtcgactcaacctaaaccgatggcttccggctcaccatcttcgcattcgcctgcgccttccaaaacgtcttcccaaccgacgacaccccctctgtctcgcattcattcgaccttgcatcttgtccctaactcctcaattccaaccaaccgttctcgatcccggactccgtccccatcggtgtctacccgggcgatgacggaaaagagtcggtcgacaaagctctcgtcctcaccgacaagatccgaggggttcgaacccatcccagagatagtctctgtcgaccaatcatcagggagggaaggaagaccgatgaagataggacggctaccggaagaaaaagagaaccccgggctgacaggacggagtcgggccgagagcttcagttttttgttggaaacaggacggcaggttggctcggcctcatgagcgatgtcatctttgttgttctttatgatatgtgtatttgaaaatcatccggtaatagaactactattccttccagttatgactccagcggtgttgtcatctccatggccgtggctccaaagctgtttcatggccatagcttgaaaatgatttcctctatctctaagcggtcagcgcttcgaaagtagtcttggctccctgagacttcccggccattaatcaacaaagtttgtccatccggcgaattcagccggatatttcttctttaatctacaacttctacatacgccagacatctcttccatctcttccgtctaccgtttccgtctccgtttccgttcttggtccaagagagcttcatataaacatctctttcactggagtttgagcgtctctttgttccttctcaggtcgcaatacacacacacacacacacatacacaagattttttattctcaaaaaatggaccagatcatcccagagcttaacggacgattggatacgctcaccgcgttcctcatcaacatagctggtgtcaaagatcgagtgaccgatctcagagtatccgaccttgataactcggtaagtgattcgttgctgtttctttatccggttggtcataggtttgatcagcagttgtactgatccgctgagccgaatactgcctcgtacagggtcttgagctgtcctaccaaccactcacagccgaacctggcgctcagccaaaactagctcaggtaacgagattttctttccaattctctttcgatttagctgaaatcggagctgacgtccatgtgtcatcgccataccgaaaacgttgttcagattccattcaatccgcctgtgaagacagctgatgaagcacggacccggttgtcgaaacttcgggaagagtccttccgagccctaggcgtcgtatgttcatgaggtcttattccacttctcaagccggacaaacgaccggttgattctaatcattaccttccgtttggatattggttaggtccctggtagttcgctagcaccgttcgagcgacctccagttctctcagagtggggactcgttctggccctcctagggactcaggcaatgtttctgactgctactcctacatcgttcgttcttctttccctggtttattcatttcgttaactcttccgctcgaagctgtttgataaggtatcctaacacgaccacgagggggcccgatagattcctacctgtgatgcaagagatctcgaggatcagagacacaaagcttccaggaggaataagctttgttaaatggtcctacgcgcttctcttcgttgcacactctctggagatcgtttggttcaccggaagtttccttaggaagaaaaaccttgtcaggagggaagacctggtaagtttttaactcctcatcttttctcttcgtgttctccgttttttttttctttcagttcgcgcgcactgtgcaaacacaagatgttgactgccttctcttcgtccaacgatgcaaacagacaaaatggagttggtggactctcttctttggtctagctactacgtgagtcatttttcctctcgtgtgatacccagagtgagacgaatgctgaaaccagaccttctcgttcatctgtcgggaattactgtaccgtatacggatactcaagttggccgcactacaaacgaggttcgtttctctagtctatctctccttcgttttctcttcaagtcatcgttttaaacctttcgtctcttccggtatcctgatcgttcgtcctctgtcttgttgtgttgatggcgcaaaaaatcaccttagaggttcaaagaacccatgttgagacaatgtactctaagcggtcataggaatccattcaacctcactcctccacacggaacaatcgccatctgaaattacctctattctgtccctcctcctctctagtgttgtctcgccgtttttattagattaaagcaacttacaatggctcatgtgccggtagatagaactatcccttcagatttatcgaatagtctttctttggatttacacaaaaataacatgacacatatattataggaaaagttcataaatccattcgaaacaacatatacatgtgcaaaaacaaagaacattgaacgagaaaagattggtttaagaccgggtcagtatcgtgaggtggttgctttcgttttctttgattagtgttagcgactggaaatcaacagtcttccctttccagtggtcagtatgggacctacccccaaggattcacgcaggtaggccaaacatgtagcgggggacgaacgaacacacgaaacgagaagcggcactaaagggccaaaagaatacaaaacgaaaacgaaaagagggaaagaaaaaagccaccgtccccgcctctaccgacgaaggactacctcaagattttatcatgcaaaaaagggtacatcaaagaacagataggtacgccaacattttttccaagaaaataaataaattagacaacggtccagactcggacgacctgatgagcacgaaaagtaagaaggagcgtaagtgaatggaacggcaacaggaaatgaagtgtggaaagaacccacgttatcggtgaaaccagcgaaaagagtctgtccgtcggcggaccagttgagggaggtgcactcgaccttcttgtcggcaccctcagcggtgagctcatcaacgatggacttggactcgaggtcgaagatcttgatgccagaggcggtggcagcgcagagccagtatcggttgggggagaagacaagggcgttgacgatgtcaccggcctcgagggagtagaggtgcttgccctcgttaagatcccaaagcatggtgattccgtcctttccaccggaggcggcaagggaaccatcaggggagacagagacggtgttgatgtaaccggtatgtccgtggtggttggtcttgagcttgcactgggaaagctcccaaacctacagttgaagaaacaaagggtaaagcacatgtcagtaaaaggtttttcaaaagattctcgggtcagggatgcagagatttgtgatggtggaagaaatcagcgatcttggtgattaattgttctcatagactagatgggtctctgaagtagcaaatataggttgatcatcactttaaaggtgggagaggtggttgtgggggtggcagttgaaattgtactatctggatagagacaggactgatccacgaaagcagcagaaggaatgataaagcaaacacgtaccttgacaaccttgtcccatccggcggagacgatgacggggttgagggggttgggggagaatcggacgcaggagacccactcggagtgaccctcgtccttgatgtcgaacttgcactctccaagagtgttccagagcttgatggttcggtctcgggatccggagacgatctgtcggttatcggcagagaaggagacggagaggacatcggcggtgtgtccaacgaatcgctgggtggtcaaaccagtgttcaagtcccaaagtcggagggtgtgatcccaggacgaggagagggcgtactgtccatcagaggacataacgactgggtagagaaaccaaggaaaaagaagacatgagcgtcttgaaggtttgacacgaaagcagcaaaaacaaggaaaactcaccgtcagagacgaagtgggagtgaccgtgaaggatcttcttggggtaaccgtaagaagtatcatctcgggtgagctgccagacaatgatgttcttgtctcgggaagaggtcaagatgatatcggggttctcgctggaggtggcgatggcggtaacctaaaggaatggtggaagaaaagagaaagaaaagacaagctatcaattctcatgctcctctttgaccaacgaattcaaaatctcaatcaaacccggagaaaaatgaacttacccatccaccgtgaccctcgagggtacccttaaagacaagagactcagacatatttgctactggttgttgtttgggttcgaaggaagctttcggaaaagaagcaagagtcgacgacgggaggagaaaagagaaaaagaggaggagaaaaaattgtgggtgtgtaggttttcgcaggaccgtaaccacgaacagggctacgagtcgagtcacgtgtgttcggcagtcggaggtaaattcagcacggcttcggttttccacgtggaagttctcgccacaaagcgaggtgtggctacacttacgccgctggctgactaatctcgatcgctttaatcgcttagtcatctctaccatggttacaaaccctccatcttgggttcctggttccttgttcctgttgcgccctctcggtcaaatcccacttctcgcccaacacgatctctcttcttcttctttcgcattcatctgatcgaccatggtacgtgttctattctggttgacctcagccgtcgaacgaaacgaaggctcacatgtctgtgtggttttgtgtgtgtgtccttggtcctcgggaaactctgctttggttgcttctttcttcttgctcccatcgtcactcttggttccacatttcgaaatatagtccaagcatcatcccggtacgtgcttattcattctgttctaatatcatctgagccactcatcatcgatctgatctgacttgatattcacctggctacatttgcagatctcatcatgtgccgtaggcaacctggtatcggtaagtcacttcttttcctcttgaccgacgtggccttttcattctatcgggccttgcttgatgacgatgcgtttgcacgaatcaatttcttccttactttatgaatagctatcggtcgtctgtgcgagaaatgcgatggaaagtgtcctgtgtgtgattcgtaagtcatcttttgctttgaactatctgatatctgtgtgattaatcatgacccattcctacaggtacgtccgaccggctactttggttcggacgtgtgacgattgcaactttggaacgtacggtggaaggtgcatcatctgtggatctccaggtgcgctgatacttccttcttatcttcctgctcccgttttcttgctgatttgaacactcatctctctttcacacttcgctttctcacaggtatctcggacgcgtattattgcacagagtgtacgcgcttagaaaaagaccgggacggctgcccaaagatcgtaaatctaggagcgagcagaacaggttcgtgatctgtcacttaatttctcacttatctgtaccctgatcttgtaccgtgatgttgacattcactttttgaaccgttttacctgaactatacttagatctattctacgaacgaaagtcagttgttaaatgctttctcgcgccaatccagataataattgtttctcgaccttttttcgctaactgcttccactttacttctttgttcttgtcgtgatccctcactagaaagcttgggtatgtcttcagctctcatttcattgacccgggaacatattctgatcagccatggctttcataattacattctcactctatatcttataggtttaaaaagggttgaccgtttccgatctatagtcttcaagaaagatgcacatgaattgtacactatactgaatatccgacatacacaccaggtcgtccaagaatagaatcaaatgtcagacgatttctgttcagaaggaaagtccacttttccacatacacgtcaatctattgagggctttagacacagagcgttcgtctctgtcttcatggtcattcaggacaaagatgggggtatcatgaacagaacggacgaagaaaaaccaccttcggcaatgtccggttttgctgctaggggtatccaaagtttgtgaatatcgacctcaggacgaatgctgggcaaacaagacagacagagaatcttgattaccctctaatgacgatgaaacagagtgacgttctgtacgaagctttcgagcaagacgacaaacgatagaaagtaagaacgcgtagctcagcgagtcgcctgataaaccatttgacgtctacctgttcgttgtgtttctgtacttgttcaaattctttgctatccatgtatggaaactgctactctatcatcccctcttcatacgaaattcacaacatcagcaaagaacaacaacaacaacatttctcatctattctcgatttatgtagtagtctctctaaaatggaccgatccccctttgaatctcacagtaccagttatccttctcccactcttccttaacgagtctaacccaattctgaccttgtctaatttcctttccttctctcgcatcttctccttctacgagagaatttacaaaatgtatctgatcaagctcgcaagcttgcttgacaagggaagagagctcggaagatttgaagagatgatagtacctctggaacacctgcggagggcttgccggtcgagcgggaggagtgatctcttctacaggcgtcggttctgagactgcaggaacagctgttggaccatctgtttcatctgtgagttggtcaggctgagcacgagaaggcttcttttttgaacccggttgtttcttctgtttcgtaggtttcccagccccgggtttgagcgcatccttgacagtttttggggcttctttcgagaggacccaaggaacgaacacgtcctgagctttgtcatccaccgcaggttctggtatcgctgccttgctagccactggcatactcgaatacgaggttgatggtgaaacagggacagaggaagacgaaggagtagggttggtcttggcggacggaacaactcgacgagcgccttcaccttgctcaagagcccagacgtatatcattccccgaccatgatcaggtacgaggcatcggatgaacgttcgcattgcctccaaacgcctttctggagtagataggtgatgcaaggtggcgatcgagatggcgaagtcctattaaacaagaaagagatagagaagaaaaaatagccagcaccatgagccaacgttgaaaatctaaattgcttgaaacacgatcttcgagagaaaaaaacaggaagacataccatcgagcctggtcgaactcctccacaatcaagaacatccccaatcatgacctctcttctcctttcatcgtctgcctcctcttccgtatcctgcgcgtccgaccgtttctctttgacatatccaaccctctgcgcgagtgacagaagtctatcactccgatcaagcccaatcatcatagacgatccattagatccatcccaagccggaaggtatttgccgttcccacaaccggcgtctagacctaatgagccagggggaatagtgtgcaagaatgcagctatcgagggccattgcttaggaacgtgatcgagcagagaagggaagagaagaaagagtcaacttctgaaaagagaagcatagaacgaaagaaagatgagcacttgcaaggatagacacataccttgtatctggtagccgagaaatgagtagcaatcatctatgaagtagaaacaatctatgtgttttcttaagcaaggcaggaacttgagcatatcaagaatagttagacgtacgttgtagacctcgtgaacattcttttgctcatagtccgatggaagatccgggctgggcgctacggtcaatggtggtggtcccataatcaatgttactgatgttgatgatgttgctatagaagaagacgaagaagacgaagatgacgatgatgacgacgatgatggtggttgctgtttgctctgctcgcttggatttatttgggaaatatcaaaattattgaagaaaaaacgatttgaatgaatatctaatctctctcgatcgctcaagcccaagataccttcgattctcatacaccatcacggttcccgacgatggacactcaaacttctcacccggccttggcactctccttgtcagatggatccgagtccgattcgtcatttaccgaggttcagtacgatccggcaaaagatcgagagtggcttgaggacgaagaggaggaagcagttgtggcagctgccgtggcagtgaatatcgacgatgagaatagagaacaggagaaagcaagtgaggttgtaatcgagtcatcgagccaagccgtaacaaaaaaagagaaagagaacggagaacttctaatatgggacaagaatggttgggacgacatggttctccttaaagcattcgatgcagccagagaagaatatcaggttcgcttctctcctgtccttcgaatgatactacaacaagctgacttgaatatgagatcattctaaatgtctaccggccaaaggcgtaccatgcaccgatagcaccatacaagccttttgtagctgatccaatgctggccattcggtcaaaggaaagatcatcaaattcatggaagctgaagttggagctcaaggagcaacttgctcgagaggcaaaggaggccaaaggaatccctccacccggtgtatccaacacgctgaatttgttcgtcatctttcttctttgattttcatcctaagtccgtgtttttttgatgaagaaaccaaaacacctattgaattgagcgcaatcgtcattgttcttacaatctgaaataatcgaaaaatcgaacaatcatacttggtggtctattgacaaaccccagatggtacacccgactcgttccttccgcttccggctcgaagtctaatgcaccgttggcatcatcatcaacaaattcgggccagcccaaatccagtacgaactcttcaaagggccgttcgaagaggtctgctcagccagacatctctatcaatccatacggttctactccgtctagtttcgtccatcatcttctctttttgttcatcttcgggttttcattcaattgtttaattgccttttcttctttcacaatgtacccaaacagaaaagagacacaagagatcgaaccaaacgacacctccctcgatcatccactctctatctccgacccataatgattacacgccggattcaccaagttatacacctcaatctcccacgttctctatccctggttctccatctccacggtcgatcgatcaagcaccgatagagcctgaggtggaaaaatacgataagcaaggccaagatctaaggagtgatgacggcagaggaattgaagaagaacaatgggaagaaggccgcgaagtcgagtttggtttccttggtgtcggaggtggaggaatgctggattccaaccagtgggacgattctagtctagtagaagattgggaaagacagaaaaagaattggcaggttcgttgatctttttcgggtttctttttcattttaatatctgtcttgggtttccatcttctccttcccgttcgagacagaacattctcacatcttgttcgctaactttgtctttgtctaccaaggctcaacacggaactaccaaatcatggctcgatcttgcgcttgaggcccaagctcgaggcgaatccatttccagcctagacatccagcctgcggttcctctctcttccacatccacatccattcctacttcgtctatctcatccgcttcgtctggaatcgataaagttgccgagagaaatatagctcgattcaaggcggtcgctcaagccggaatacaaccgaccaaaggcactggtttggaagacaacacgtcgggcgaattgtgttatgattaaaagcaatgcatgaagataaacacaactggcttcacctgcccagtccttccttccctatatgtttatcgatactcaattaagagcgtcaatgagagaaagaataaggaacgagaaatgatacatggatatacaagaatggcagtttcgcctgctctatgtagaatgagtgaaggggaggataaggaaagatcctactaaaatcctattttctacacccgtcttttatcgtcctcaaggccagtctagaagtatagtgaagcagcaaatacaatgtctcgcttgatcaacgcctgcgcgtcctccatctttttgaacaactcagcgtctccgataactcttgccgcgtcccggacttcatgacaagtttggtcgagccgagtaatcactcggacgatcgttccttctgctacatccgtgagttcagtaatttgttcgaagggctgaaaatcaaagaggaacagagcgatcatcgataagaacaagttccagaagcaaaagaagaaacggagaaacaatagatgaaacgaaccatgcccttggcccactcatacacggcctcaactagaccaaacttcagcgtagtcgcataatcatcatgcgggaccttgttcctatcctgcacttgaccaatcttctcggccagttctaagataacctttttaccctgtgaaatcaacccaaaagatcagatcggtctttgatgctggaaaatgaaagaaaggctccagttgcttacttcttctagacgagggggaatgctcggttccgaatcagacttttcttggaacacgaaacaagacagaagagccacgatttcttccggttcaaaggtggcactgattttatacaaatcaaacaaatacggtcaattttgatagcgtatataagattccatcatcaaaatcagtacgtacaggatgttctccagaatgagctctgtgagaatgagctcatttgctgagttaatcttttatcgagcaaaaaaaaaaaaccacggttcagaaaatatgaacaaaggggatactgcatcccactgtgacacctcaatcgagtgaaatcaacatacctcacaagccactcggcctttgagcaagacagtagcgttatggtcaatgaaccgaagttccttcaagacctcgatcctagactcatagtccggtaacaactcaagattctgatcagaaattgccgccttgagttcggctatcttgttctgaagtatcttctcctcatgcatagaatcgtattggaaaaagaacggttatatgcggaaggtcagtatcagttcatcaacccatttcttgcaagaaaagaagtcaaacaaaaacccacgtatttctcgatatctccatcgagcttggactccagcttttgctgtcgtcttaacatcgactgtcgagccttcagcgcgtcttggatctcgatcgctctaagtttggaccagtcgatttctgggatctcgcctgatttgataaatctgtccgttgtttgagccaacccctcagccgtctcttgaagagctgaaatttcaaatttggtggataccgctcggaatctctcggcgtccatctgcaaacaagtgaagaggcgaagagggttaggttgagaagacaacccagtcaaactaccttttacgagaggagtcaagaacaaaccttgtagatcttcgaagtgaccaggtttatacttgatgcaggaaccaccaccatctcgtatttgggctcagcaggtcgttgcaacatcgacaccgatggcggccacctaggaggaggcataggtccgtctgtccatgtttgaaaggcggtggtataagataattaaccaacttgccccacaaactagttaaggatgattaggcaccagcgctaacaaaccttcagtgatgttctttgtaacctcgtcaaccaggaccaacacagcgtacgacttagaagttgccgctgtcgggcttgacatatttgttaccgggcgaagaatgataccaacattcaaagaaaatcgctagaattaaaataagatcatagaagacaagagaattagccgaaacacaacaacgatcagatgtcatcaatgacgaggcttgaagagagatcttacgctatctctaaggagaacgacacgtccagaagcgaagatcttgggaccttgtgttgaaagcgcagcattgtcaatgatccaactgttaaggtaaaccagctcggtcgaggcatcgtagaaagggctcagttccggactacagtcaagttttgttagttgactcaacgccctttcaatcttctcggtttcaagacaaacaccagagaagtagcaaaagaaaaagtgtcaagatagtaagcagccttgagggtataaaaaaactgagcgctgaaagaaacagaacatacctcggcaaccttctcttgttggtcgggaagaagactctgcgatgcgttctcagagaaacttcgtttgatcatctcttcaaccttgagcgcttccactctgagcaagttgagaagcatcgagaacgtaagtcggaattgagatgccagcttgtttggtgtaccgagcatcatctggtgaagtgcttgcgcctgataatagaagatatgtaaataggaacatagatgaacaaaagagatccaagccaactcgaaagctccaggccaagaaatgggaacaaacctcgggaatctcatctttagggataatgataaccactccagttgcgtcgagacctcgtcgaccggctcgcccggacatttgagtatattctccaggtagtaggtctcggaagttcgttccatcgtgtttccgggtaccggagaaaacaacagatcgagcaggcatgttgactcccttgagaatcacatataccataaatcttcagctttgcttgatagtgagaagcaattcatagacctaggaatatcacgtaccatcgcgaacgtttcagtagcaaacaagactttgacataaccggaagcgaataaaatctcaacaacctctgataagggtgttttccagggaaaaaaatataaaaaggaagagtttcagcggccagtttcttagaaaatagcgacataaacaacgtcacggcgagacgatacgtacctttgacgatcggaaggagaccaccgtgatggattccaatacctcttttaagtagctccttcattcgttgaatttgcggcaaccgttgatcagattctgaatcaatttgtatacacatttgcatttttgttagtgaagcagaggaaaaacattacattgatgtcaatgaagaagtgacaaataaagaggacttaccactcagtcgcttcattgcgttctcgatgatcacatgcaccttgctcttctccactgctgtgcacaagttcacgttacttaatcctccagcatattcctcacatcgcttcttcgagaacacgaaacaaacgactggcagcagattatttttctgaaggtagttgaccaggttcgaccaaaggttcttgtcctgaccctgcggtcggaagaacccaccaccgccgccgccccctccgccacctctccctcgagtcatagcaccacctcttccgccgccgttagttggttgtcctccccgaccgccccgagaaggcggtccaccccgaggaggtcctcctcgacctcctcgcgcaggaggcaatcctcgcccgcccgtccgttgaagtgggggtaagccagccgcttctcgctctttaacctgtttccgtacaacggcgtcagacgcgctcttcaatctaataaaataaaccatttagtcatattctattgtcagacctcgtcttccttgctcaaatgatcgaaagagtccttattgagaataacaaatgaaggaagaaagagcaaacggacccgtcgttaaggaattcgccgttcgagttgacaatcttgtgtagctccttgccagcccacaagaaatgttcaagaggtactggtcgttttggcgtcgaaataacgtaaacgtcctttttcttcgttcgactaccgatgttctccaccaaacgcggactgatcagcaacagttgagatatcaattatgaaacaaacaagtcagatatgcatacccgacccatcctgcaaactccttggtattgggcactgtggcactgagtagaatgatgttgacatgttccgggagaaggatgatgacttcctcccaaacgactccccgctaatccaaacaacccaaagaccggttagcaaatacacaaaaagacataacgcgacagcagagcagaatgatggataggaaaggacaaacctcggcatcattgacatagtggacttcgtcgaagataacgaactcgacatctcgaatcaagtctgctcccttgtagagcatacttcgaaggatttctgtcgtcatctacggttagaacgcgagaaagatatcagagtctgaaaccataatcgacatcatgaagggaacgacaaccaacgatcaaacagcttccttctgggttgatctgaacatctcccgtcaaaataccaatcgtgctgggatcaaaactctgtttgaagtctctgaacttttggtttgacagcgccttgatgggcgatgtatagatagctctatataccagaaacgttcattgagtgcagaaagaggtaagacatactgatttcgacaatatacgacagaaagagaagcaagaaacagttggttgacgaaccttgtcatatgtttcgccgcaagagcaattgcatactcagccacaactgtctttcctgcacttgtatgcgctgccacaaacacagagtcacccatttcgagatgatagattgcttctttttggaaagtatccagattgaacgggtactatttattaaagagataatgatgacgttcacaataagacatgtatgttgagaggacggtatagagatttggtagtcaggaacttacctggtacgccatatcaggaacgagctcatcaaactatgtgaattgagaggaacatgaggtgcattagttggagtgtaccctacgcaagacgacttgagaacaactgacgttaacaagctcttggttcacatctaccacatgagcccactccctcttctcaatcttctttactcgtttgggtttggtaactgcgccggaggtggacgcgccgaacgactagggagaaagaaagaagaaagacaccaagatgaggctttgagaatcaaaaagtccgcttctaaagcgatatttagcttacagaaggggacaaaagatcgtctattccagatatatcttcgttgagaacaacagatttgggatttaagagtgactcagctgcgagtttcgcctgtggtcgtgcgtcctgtgagtccaattcacacacaaaaatcgacaactcagtcagcatcttgaattattttgtgtactgcaagaaaactcacgatgtttgcatcgtcgccatccccaaccttggctttccgaatgccctcgcctggaccacgacctaagaaagcttcgatgacccaatcgtccgtttcttctgctccttctgctgtgaacattttttcaagattcaagcctctagcaaaaccaggaggtttgactctccatcccccctgagactcttcttcctcttcgacgaggacgttctgctcggcatcgagcgcttcctgttcggccgttcggagactgagctgagaggagattgcaactggctcaagaccacccggaaggaagggaagattgcctgaattcccacggacaaaagaagttgctccagctggtgcgcgggtgtatgataaagaggtcaaggatgatggcggagggggaggggctttcgtctagagtttgggagatataaatggtaagtaccagggtggacttcgaagcacacaagggtaaaggttgaaaactgacctcaatccagcctgcgacatctccagaaagtccttttcgaagaaaacttgttgtatgcgtgggcggagctggcagcaagggtaatttgggaaggggagtcttcatctcccattgactatgtggaacggagtttaagacgatcggccatttgccccgtcatcaaaaagaacaatacgacataatcaagaatgttccaatttttgtttcacaaaaggcaaaaggaagaacagaaagagagaaaaagagtttggaagactcacactgtaaagtccttgagccagtcctcctgaaggacgttccgaggagtgaggaacttggtctcgatctgttgatggacgtcatcttgtgtgggaaggccaccaaggttgagctgagcgagcagttcgtctgctggcctcgtaggaacagcgatggccatgtagatgcggatgtgtgtgggtgtatgtgggtgtaggtgtaggtgtctgtgtgtaagtactagggcttgatctatgggtttcaggaacacagggcggtcaggacagatagagaaaaagaagggactgcaggaacggatcgagcgagaatcacgattagtctgacgtcggtttgcgaatcaaagggagaattggatgtgaggaacgtggttgccatggcgacgacggaaacagggcgatcgtcaggcacaccgaatgcgatggtcgttttcagggcaagacgacatgccgaaccttcatttcgttcctgagtttcatcggttcctgaatctgcttgccctgagtccatctcaccgctcacagcatgcctcgatcttgcgctggatcacctcttactgccacgacttcccgacgtccaccgggagagaacgagcctttggaggtcgagatcatcgacctggcgaacgaggattctgatagggaagaactcgtcccagcaacaatgaaccaggcagaacaacgggagcgagaacaagaaggtgacgatgaagacgagatatcctttcaagggtcaaccgggccaaggattagacggtttggtcgaacgctcgagagaatcctcgggggtaagtgagtctgtgtgtgtgcattcttatcatattcgtctttcaaagaaagctgactgacctaaccgatccctggcatttaccttagagatcgataggcctctacagaatccagaagagcactcaaacaccacttcttctcactttaacacatatcctcaacagtcctttatctctccagaggaatatgatggctttgacgatgtcttcgtttacgacactcccctatcacctcccaaagccgtccagaggattcccaccaggaagggattctctcgaagttttgagctcgagctaggagggtttatcgactctgacgatgatgaggacaaaatcaaactggaaggtgaagagaaagtcgaggctcctcaaagcatacaaaggaagaaacggaagctgtccaaggtccaccaaggtctaacgttcgcctgctcgggatgtgagaggccactattactgaacgccgaatcgtctgggaggaaagtatatgcactcgcttgcggacatcgtgagtctctaaattctctctttatttcctgtttctctgctcggcatgtcggtttccgtttgacagaagatgtctcatctgtcgtctgatcctttgctgccttcttttgccagtgatcgatgggtattgcttatcctttctctcgacaccctcacacttaccacctgatgcatctaaacacgcacccaaaccgtctcttccaagaacctcttctgtatttcctagatctcactctttgtcactcccggcgcgaaacgcaaaacgagctctcaagagggctcaaacacatcggtatgtctgcccggtccagggctgtgggaagacgtactacagtgatctggttgaacaaccggagattcttagaccggatatagacctctcaaaagatcaagagatgctctggaaggtcagattcggatctgatggggtgatacctgtctatgtatgacacatgtagttgatagagtagattgagaacaaagaaaattattagttgttcatctgcgctgcttgtttataagctcgtcagaacagagacgggtgctgatgatggcgcaaaaacttatggagtaatatatcaatgatcaggtgaatagatcgcatataattcatgacatatattgtacaggatatgtccggatagacaggtcaggaggaagcaaaaagggagagaaggatgatttcaagcgtactaagaaaacaagcaatatgatgtgcgatcaacatcagtcctggaagtttttcgaatgaaaagaacgaatgatagaaggaagggttttttctagacttactctagtgaacgttcctctggtaataaagttgtcttcttcctttcctttcttacccgcatacagacttttgactgcatcgctcattcctcccgcctttctcttctcctcagcagccttcaattcatcggccactgctttcgcaattaacccaactctacctccattcccgttcatctctgtcttcgccttggccttcttgtgagttgtcttctcagcaccagcactgtctccatcatcatcagccgccactgctccagacttgcgtttcttgttcttcttcgcagccttctcctccgcacgagcagcattgatcaggatcaaaagatcctcctgaaggccgaacgaggagttcaagtagatgatatctccattcaataactcggcagcctggtctttgtcggtcgaacggatgaatgtcggtctgaatgaggtggaacacgttgggcaggcgtacatccttgacttctcatccgacggagaaggagaagtatcagcagtcatcgttgagggtgatttcggctgaacaacggatgaagtcgtcagagtggctttcaaacctgcctcggagaaaacatctccgcaaggacgaagggcgacaaaaggagtcgtgccgttcgcctcccgttgagttaacggacacgagaatgggaatttaggagctgtcacgtcggacgtctcgtcggcggaaggagagtagaaattcgggttcggggtcagttggatcgttaacaagtcctatatcgggaaagaaagcgaacatacagcatacaaccgtcaattagcacaaaacaataaaatcataacaaaaggatggtatgaaagaaacaaactttgaatcctcggatgtgtccgcagatcgattcgccatccccgtacgaggatctatctaggagaaactcgagcatcgcgtccttgttgtacattcttcctaacgcgtccagcacgataggtgatcgaagagagcgctgatcatcaagattttgagtcaattgtcagaagacgtcgagagaaaagaggataaggacgacaaagattacgtacctttgagagagcgcatgaactccattgggctcgacggaggttctctccatcggtctgctgtgctttcggcttattcttgacaagatcccttcgatcctataggcagtattccaggcaaacaattaaactcagtcgacaaaaccttttgagaagaaaggaagaacgaaacacagcaggagaatgtatcttacagggattgatcctccatcggctctaagagaaggattaaacgccggtataacagaaagttgccggtttcaagtcagtatcaagactttattgtacgccaaagaaatagatactaaccccatgctaagataaaactaatatagaataaaggaagagagagggtgatagagacggttgagagagtgtgtgtggatgttcggataatcttcgacgttaacagactttggtggcaacgataaccgagtgagcctcgacgtcagcctggcattcgtcacatgctggaaattacctgttcaaatgagttgctctcaaacagtctcattctcctcatcatcctttcttttacagatagacataaacatggtcaagacggagacgacaatcgattcggacggctttagcaccgtatctcgtataaagtatagagctcctttggcttctactttaggcaaaggaaagaagaatcgaaagggtaggcagacattgctgcagggagccaacgcgcatgacaagaagtgtgggcaggaagaggaaacggtagaacatcaagtcaagaatttgaatgaaactctcaacagccggaaaagggagatcatgggccatggaggatgggcggctgcttgggaaggtttgtcctatctttcttctcctttgggtttaaaaccttcataaagagcatggtccttccatgcttatgtctctggtgtatcttcgactatgcttgcatatcaaatactcgtcttgtcatgaagaactggtggtgtctctcaagacggattcgaccttcccgaatccatcaaggatgacatgtttcggactaggtcctgtatcaacgtcccgaatagctcaatgccagttactccttatgctcgaccttgctcagaaattgcaaatcaatgtgctagaagcttatgaccctgtgttctcaacattggataagtccctattgagcacatatgggattgatatcatctcagagaatactgtatgtgcttcctatcttttctcgtgtactttgggtcttttcaaagcaactgacatgatcatggcgctcttcgaacgacagcacggtcattatcctttatctatttctgctggcaattctcaaacaagcatccatccttctaccgagcctgcctccgatgaccagctgccagcttgcccttcagattctgtcctctcatcctctcctgtgcctccgttccctccggtatctcttcatccaacatcgactgaaccagacacacggacggctcacttgttctacatgccccattgcccacgaacgttgtatcaaaacttcttggcgtccaattggtcaaaatcgcagctgggaagcattgcgctcctcgcaaatgagtttgaaggttatttgacgaggtgagaatgagcaacactctcggagcagttgaatattttggtctttccgcttcattttgggcagtcatctgacaggccgatgcattgctgtttgttcgtagggaaccgttgaaaagacttcaaaaggaagttccttgtttacccctcataggtaactaccctcaattcatattcctcgatggtcgtgagggatctcttaaatgctcaccgttgcttgatccttttccttctgtcctcgaacatagcccctcacttgaccacgaaatctctacccctaaatttcatttctaacgatgtgatcaacgatctagccttccaatgggtctcagccgagtcacttgctaagatagacttctcgaccaaggcgcctgtagggaacatagatcctaccaaagatgaaattttgtagaaccaatctgtgtggaagctcattataccattttggtgctggtccccaaactatctgtcaaacccatgacttttcttgtcgtctatacctttgtttgaacatcattgatgcttcggaaggattccactacgatgaaacagcttgcttgagtctagacgtgtcatttgtttatatagagatacttgtagcttgaagggtgcttcattcaaaagataattgagaactgatatatagaggaagaatattcattccatcgaatctcgtctctaatggttcaaatcatcacacgtacgagagacaagaaaggaacacagagagaagtcagtctcaagaactaggaatttgaagaacgatatgtaggtaggaaggcaaagaaatcacggacctctcgctgtcttggttcgtcgtcttcactttcatctccgtctcgctctcgctttctgttctcctccaacactgtgtcaaaataaattggtctcagtcagtatacggggaagatacactgcatgcatggagaacagcaagaccagcaggaaagacatactctgatcggctccttctccctgaggcacctgtcctccaccaagacccgttccacccacaccagcataaacctcatactgcatagcccctcgggctcgatcctgggcttccttctcagcgagcgctcgctgatgaccccatccacctcgaccagcgtcatattcctgccggaactcgtctcgaacctgtaagaatcattttgagatgtgaatcaacagccattcttctctttacatacaagaaacccaaagattctttcgataatatatacctgtccaccgttctttcctcgaccaaactgtcgaccttctatgtatcctgggtcgagatcacatcgaatcactcgctcgtccaaccgagtgcccgagatatatctcatcgaagccagagcttcttcgtgggtatagtactcgacaaaacagaacccacaaggtgtcctttgagaagttgatccattcaggagggaaagtaagatagttatgagattgcgcgtttgagatatgagggataagtaaaccagagatagaagtacggcttacttgttcctttagagaatagtcgataattatcgaacaccgttaataaggagctgaatgacagtacaagaagactgtagagacatacattctgtcaagacccataatgattcgcttaagtccaccgccttccagtggatctgtacatctcgagaagactaatgttgaacaagagaggatgtattgaagatgctcagccaagtcatgaatattaaggtctcaaacatcctgcccaactggacataagcaagagaccaagagacaagaggacccgttacatacgctcataaatctgttgttcagttgtgaagaaggacaagtttccgacgtaaagtgtggtagactcatcaaggagagatttagccctttgtcgatccagcttaacgatcatcaagtttgaatggtgagaagagcaagagtgtatttacgatcagcctcatcgaactctttcaaaagcaaaaaccataacggtacctacatgagactgggagtctctataagtagacggcttgtccaacggttgaacgacgtgagccatgattaaacctgtatgtatgctggatgatggatgctctgatgctggtaggagaatcctccgtagtgggcaggacaattataggcgtaaagtcacgtgatctcttgcgccagatcgctttgcaattgccttgtgctgcacggcttgattctccctcaacctacacctatccactgaccgtctctccctttcttgtccttccacacatcctcatacccacacacccacatccagctaaagaagatgcttcgccaggcagccagaaaggctatccagaagagttcaccaaatgtgccttacgcttgtagggtcgccgttctgccagctgctcgaaagtactctgtcgaatcagtccagatcgatcagaaggatggagccaaggagactgtgctctcgccttcgcctggtatgccttcccgcaaagcttatgtatgacgacagatataacccaaaacatttctgatcctttccaacgttgtttatactctatgtttctgtcaaatcggtcaatttttcctcctctctctctgatggacttttggcggttgatttttttggtgggaattatatattgtggtggaatcgtctggttggattttgaatcaatcgaactagactcgttcggcttccaagtcgacctcaagaacaagagcgatcttgcagagagacctatctacttggatatgcaggtaagctttcttgttcattgatgttgatgaagtccgatatcctcggcaaactgcttctgctgcgagcagagctagtacatatgatgatcatcattaaatcttgatattaacaggcaaccaccccgatcgatcctcgagtgcttgacaagatgcttccttactttaccaaccagtacggaaaccctcactcccgaactcacgcttacggatgggaagccgaaaaggcggtggaggaggctcgatcggtcagtgtgctcatccggatgcagttctcgcgtcgtccgccctgtcaagatatttattctcattcgttcaatttttttctctctttctcaatattcggatgaaatctgatcaaatagaatgtggcttccatcattggagctgatgcgaaggatatcatcttcacctctggagctactgagagtaacaacatgattgtcaagggaatcgctcggttctggtctggctccaagaaacacatcatcactactcaaactgtatgttttaattttctcgtttacttcttgttctcaagtgtctctttcatgtctgacttgaattgttttgatcatcaaaacgactttctttgatgacttataggagcataaatgtgttcttgactcttgtcgatacttgagcgagcaagggtttgagatcacctacctccctgtcaaacccaacggactaatcgatctcgaccttcttaaatcctcaattcgcccggacacctgcctggtctctgtcatggccgtcaacaatgaaactggagtgatccaacctttgaaggaaattggtgagattgtcaagaagcaccgaaactgtttcttccacactgatgcagctcaggctgtcggtaagatctcaatcaacgtcgacgagatgaaaatcgacttgttgagtataagtggacacaagatctacggacccaaaggaatcggcgctgcctatgtgagaaggcggccgagagtcagactcgagccgttgatccatggaggtggccaagaaagaggactcaggagtggaactgtccccgcttcgcttgtggtagggctaggagaggcttgcagaatcgccgagaaagagatgaaggttagttcatgcgacgcatctatcgtcattcttttgaattctacaatatcagaatgtgcacgtctgtctacaacagacggaaagcgttgtagagttggaaggaggttttcatgacgaattctgccacgctacagatcttctacggaaatctgaaggtctagcagagatggagtgtgttgaccttttcgaagatcgttctgatcaccagatgggaaactcactccagtctcttgcaatgggctgcacctatgcaggggcactgataacctcttttttcgtgctcttttaattctgagcgaatgttgttcatgcgtcatgattctatccggttatcatgaactgactcaatctacgctgcattttttattctcgtgtcttgttctacgatgtctctgggacgtatatagtatgaccatgctcgagtatccgccttggccgagcgattgatcagtggaatcacttctcagatcgaaagtgtggataggaacggagacccgaatggataccccggatgtgtgaacttgagttttgcttgcgtggaaggtgaatccttgttgatggctttaaatgatgtcgcactgtcttctggttcggcctgcacgtcggcttcgctcgagccatcgtacgttctccgagcgcttggctcgtccgaggatatggcgcactcatcgcttcgattcggaatcggtcgattcactaccgaggaggagattgatttggtagtcaacaagattgtggagattgtgaaccggttgcgagacatgaggttcgtatggctttgtgctatttttgtgttccttcactccaaaacttaagtttgttgaaatgatggaatcctaaacgcccgtcctttcttgccctctgggttttcattagtcccttgtgggagttggtccaggaaggagtcgatctctcgactatcaactggggagatggtggagggcaccactaagccctttttccttcgcattcccatattttccccgttcagatttctgcccccttccgcattcgtctccctgattaaaaaaagaaacataaaacagtgtttttctttccgcgcttttgtttcttttcaagtacatctgcctgttatttcctttttctggggttccgtccgcaattggttctatactagtgtacatatgctcttctttctccttcatgatgaggttccattcattgcccaccttacttctacatgagtctatatcgttgtaattaagtaattgtgctctgtgaaagaaaccaaaattaatgcaaacagctccggtgggcggtgtggtgtgtatatgaacgagtgccgggtccgcagtcgggcttggtagattgacccacatcgctttcaacatcatctttcttctcttgatctctcttcctctttcatctttatctccccactttcgctctattctcgtttctgattcatccacactacagttttctctctcagtccaccttcgctgtattaggttgaatatcgatctcgagaaaagcttgttgaaatccgcccgagatgagtaatgccatccagagcttgtacgcgttcctttctttctttcattcatcgaattctctataggccaagccatccttttttgttcgattcctgcgtcaatatctctcgccgtacgatatggagtcgtgttatggtcagatatcctatctaaagactcaagttactgaaccggactgtttgtttgtctctattcttgccggatggcgtttggttgattgaaaacggatcattggtcaccatcgtagcggtaaaggagcgttaagagtagcaaaagtaaggaaacccatgctcttaaaacgaaccatgctgtcagtttccgggtgccttttatttctaaactttcccttttctttttgatcgatggtgttatcgtaacctgtagaactacaccaaaggatattctgacactcaggtcagtgtcctttggatcgagcgagcttcccctctcttccacaatcagtcatttcagtccagatattttctggtatggtacgatttctgacatgatgaaacctttgatgaatggctttcgatccacaatcttatagatgaaagtccgagaggcaacctcgaatgatgcttggggaccttcgggaactcaaatgaacgatgttgctcagctaacattcaaccagtacgttcatacctcatcacctcttcatgtgatcaaccgacatgattatctgcttgataagtatgttgacatgacgaagcgtttatccttcagaaacgactttgtggaggtgatggaaatgctcgataagaggttgaacgataaaggcaagaattggcgacacgtcttcaaggtctgttattttctcgttgtttctcttcgctcatcgtattgatcatagcttccaatcttttcaggctcttactgtcttagattacatccttcattccggctcggaaaacgtggtgatctatttcaaggacaacctctacatcatcaagtacgcgtcttgtttgacggatgattttgtgagaacgagcttactgatcacacgattctcttaaataacgtgtagaaccctgaaggaattcgtatatgttgacgaagatggaaaagatgtaggcgcgaacgtcagacaaaagtgagcttttcttgtgagaaagaggtggctaggctgcctcgaaaaaatctctaacatgtctcgtgtcattgaaatatctgtaatttaaacaacctgctttgtctttctttactcaatgactacactcaaaactcaactagagcaaaagacatcaccaatttattaatggacgatagtcggctgaaggatgaacggcgttcgagaggagcaatgcaggatcgtatgacgggctcttcttatcgaagaaactctgccgaagaaaatgagaactttaggaggtaagtcaggttcatgagacagatcacgacgaagaagagaggccttgccagcggtcggaaagacaatagctgatgtgtcttttcttcgttgttgacaagtagacgcgaagatcaacgtcgtccgtctaaacggcctggtggaacagaggatgatgatctacagagagcgattcgggctagtctggtaagcgatgatgatggtgagcggaagagacgggcgaacgagtaagtagtctacgtcaaatgtatgtcgacggatggataaaagcgagactgacaatgcgcgtaccaacgatctacttttgtgtgtgcgtcgccagggaggacgagttggcaaaggtgcttgcgctgtcggagagagaagaggctcagcgaaagagggatgaagatgagcgaatccgaaaactagacgagcagacatcacgagcgttgttcgatgacagcctccaattgtatgtggtcttagcttaatttttgagttgagcaaatggggcccatcaggtcgtaagttgacatagcgaatgcatactgaccccttgtctctcttgcttcgtctgatagggatggaccgaacgcgtatcaacagcaaccgcaagttgatctgtttgcccaacaaactgggttccaacaaccccagcagactggttggaattctcaatttaatgtacgtttgactaccgtgtaggactcgagtgtataaagacttatttcgaattatcattccccttcctcgtaacatttacagccattctatcagcaacaaatgatggaacaacagcaacgggaagctcaggctcaacagcaatatatgcagatgcaggtgagctatatacatatacgtatctcgaagattgattttagaagctgatatgtgcactttattttatgtgcgcttatctgatctcatagtaccaagctcagcaagagcaattggctcgagaacaggctgctgctcaacaagccttcctcttccagcaacagcagcagcaacaacagctgttccctcaaccaacaggctatggatctaacaaccccttcgcggctggcttcaccggccaacagcaagcaccaccacctatgccgacgatgtcttcgttcaacagtaacaataatttccctgtcgatacctcgtcactctccgccaccgctacttctttcacgccatcatctccggcgaatgtggccaagccagtgaaaaacgatggagaaaattcgagattggcaatgcttttggccaacggaaggtgcgaactgatcctttgaatttcctgatgacatctacaagggtgtgtttgttgaactccttttgctctccttctaatcttacatgagatagggatggcggtctggacacattcggaaacgttggaaatcttagaatgccggcacactatggcggtagagaaggtcttgttagtcaacagacgggagcaaataatccgtttggagtggctcggtttcaacagcaacaacagcagcaaagacagccaccaactagtggaaatttagttgacttttgagatctcttaggtctttgctttctttcccctctctgtttttaccatattgcttctggtttttcatatatatcgaacttcaccactatgtgtcatgcttccgtcattcacgccgttctactgtctacctcatattcgattaaattgcggattgacttccatttgcttgcgcccatgacatgttgaactgatcttcacagacagtgaagtgtaggagaacaaaggaaacgagaaagatgcttgctttgtataaggaaatcgcgcgctatacttttcgaatgctgtgctgatgagatggttggatcgttatacaaacttggccaagctggaagcgattcatccgtgctggaaaccacactcttgtcagtacgtaccctaggctggaggatgttcatctgagctgtcggaaccgatgctaactggtttttagaagatatacgattttagtttcaatcaaggttctcattcttgtttcattcattcatggttgatcaaagtaagatctgttctacattctttgattaggttattctcaaccgagtcagggatatattctacgtaacagtatcattctgatcttggactttctcttaatcctctttgctctatatcgaaggctcgctcgtcggttctactcaatatgcacctgcagcttcgataccgttgataaaatcgccatcgctctacctccctaaacctgttcgtgtgcactcgctgttcttgaatctcgatctacaacacgtttgaccatctttctcatttgtcctttcgtcttactttgattccgtttccagatcgaactccctccagatatccatccgttacctgaagatattcaggcttatgtgtgtgaccagcttcttcttcttggtcccacataccgctgctctacttatcttgcactgaatatccatcattattcgtctatacccgacgttcaaatcagtttgtctacccattcactcttgaatctcatatactagcccatggaccagctcatagacagcaacttcaggcgagacaaaacgctcatgtcgcttacttgtttcaacgggaggaggacaagaaggcgagaaagcgggcagagatgaacagggttgctccgggatggagtccaggtggatcagcactggtgccggacagaccgaaatcaaaattgcaaaattcacaggatgaggcaaaattgacagcaacgacaatgattacaaaagaggcggaaggagggattggacagagtctttcagaggatcttgcgtcgttgaatttcgggggctgaggcaggaacggtctttgtacatcgtttctctctctttccactcttttcggtctcgctcttctagttcttctccctgcttcttggcatctgcctctttggacgttgatgtactgtattactcgtattcactcgactatcaaatatatgttttgaacaagacgatgtatggcgatatcggttcgatgcgcctagtccgcagacgatccgatgacgttgccggcctcgcgggcgagccaaacccgattcttcatcttctattctttcttcctattcacccgttcacccactcattctccaatcgacccacaagggaaatagaaacatacacacaagtcgctgtcatgagaaaagcaccctacgtccttgcgtaagccttgtcgttgactcataggtcttggccaccaagatttaaaggctctatctgatgatctctgttctccgctgttcgatggaattcagtctaccggtgttggtcgtcaccatcgtcgctggattcgctgccctgtttagacctgattggtaagtatatgcgacgataacgacaaccacctcattcattttgactctatagaggctgaaaatcgatagattctggatctcatggctgattcacctgtatcaaccttgccacttttcgaccccttttcgaccccttgctggtgattctcttcaggattgtatcgacaacctcgccagcaggatctcctctccttgtccgaacagaatatgggctctggaggaaatgtaccaaagctactataaagcgtaaccaacctaacactttttctcctcatatgtgggagggagcgtcttggacgctggacgcacttgacgtaccaccaccgtccaacgagacatatatagttggagaatggaaatgtgtacctttccgtaagatcaccttctcctcttttcccagcttctttttccacactttttgggtaggcgagtatcgagaactcattcatcgtcgacatttcgaatgcttcgtcggaaatgaatagcgtgagtttctttctcttgtagtatcggaagaagtcagaagtggcgagatgtgactgacatctgttggatctgtgtctatgctggaatttttagcactcgatctgaatgcgagcagaaaggaactggaaagttctgcgtactttggtcgacggcaggatatctgtgagtgacgcttttgaatcactatgacgcctctaactcgccctctctgacttgtggtcgtttgttcttctaaaaaatcagaaccattctgtcgcttcttccgctgttggcatcgtgtgtggccttgttagttatcgccgtcggagctggagagagacaagttcgaaagagtaggcgaaagaaagggtgcgctctggttttgctgctttacttgtgtcgtttctgtgagatactaatcggttgttgaggtataaaaaattaatataaaaaaaaagatggaagggagttgccggatgctgtttgtttagcggtacgtctcctgtaggcatataccaagtgggtcgtttatggctgatatatgcatcctttggtcttacatacaaacagcgatcttacagatcatagcgtttgccatggccgcccatgtattccgaacggattctcctcgattcttgattcacgccagactatgtagggctcgttttctttcctgctgatattgatagcgtcagacaaactttctcacctgtgcgccggatggatgttgcatttgtgcgcagacacatcgttctggctgatcgtcggagcctcaactctatcgcttgctctgtttggagcactaaccttcactggattggctgcccgtgagttttctcatataacagattagacagggcttggctgaccaaaccttctgattgtttttaccatacctgttctcttcccattacaggtgccggaaagaggtgggctggaggtcggtctgcgggaaagaagcggggtcgacacggacgaaacccctcaacgggctcggcaaggcaagctggggcaacggccgacgagaacgcgcctttgctgaatgcctagggaatctgtgcactcttttcactccattttcttctgcttcttctgcatcttcttctttttcacctcgacatcttgtgatcattctttctttattctgtctctgtacatatcgaatgatccttccactcaccgtctatccaccgttgtatcgatatcagggtgagaatgaggatgagatgaaaacagcttacgtaagcgagccaagaccgcctaggtcgcagttctcttcttcctctcctcttccgctcgacttcagatgtttgccaagcttcctttacgtgttgtcttagccttcgtgctgagaacgcaagcaagatgagttccttgtggctttacgcactcacctactcactcgctagtctaactacgaagagcaaagttctgtcgataaagtatcaagagaccaaactgacattattcggatcatccggtgatacttctcccaagacatccttgggaacggagcaagtgaagaggaaccggtagcctccaaatttacagttttctttccgtcgactcactcgtctatcttggacgattctctgaggataaagatcgtctctttcttggtctcgtcctttccaaacaccagcagcccttctctttctcgcacacgtctattgtcaataccaccattaccaggacttctaacgctttgctcaagagtttatcttctggatatcatcgatcatgcacacccgacggatagatggccctgatagaacatcactcctggttgtcctcgcccttctctcaaacatatcacatgctagaccgatcttagctttagacaggcctatcgaaggtatgggttcttgttcgtctgtctggccttcttctctatactctccctgcctagcctccttcccttttttttcaattggatgagatcacgatagccatcgagtcaaatgtctcactaacactggtgcacgggatcatgtttgacggtttgggacctcttttgttatcaggtctatggtcgaaacctatcatcgagcacctcattccccgaaacgaatccatgccctttgattctatctctgacactggcgaagtcgaagctcccaagtaagctgtcctattttactttattttatatctctttgtctctttattctctgtcccacagagaataagagtaaatgggtaccaaagaaagtttcagggctatagacttggttcgagcatttcgaaacatcttttgctcgaaggagaaccggatgagaccgaggtcttggcgctgctaaaattaaaaaagaagagaaggctaacccggtcttgtttccaatccgttctgtttatttccatacaacaatcacgtctttttgtttgtctgtaccggtgactttatatgaaaatccatccgatccgtagacaaaatatcacaccgcttgtcactggccttaccgccggtttgctcgtcttcttcctatcagtcatcctcggatggatgtactatcgacatgtcgtccggaaggctaggcgaagagcccaacaggaagaagaagaagaagagcgaaaggcggagaagaatgaacgagaaacgaaagtccggcaaggtgggacgaggggagataggtcaaggacgaaacagactatgagtccatcaggttcgaaacccaaacgtccagaacgaacccgagaacgagctcagagaccgacaagtcgaccgcgcgcagagctcgagagggagagtgaggggaatgagcctttgtcgatatcgaacgccttgtccatccttccttctaacatgtcatctacaactctgtcatctataaagacctcgatggaccgaatggattggaactcggcagctgagccaacggaattgacacagacgggccctcccacgcctaaccaggctttcttggaatcctcttcccgttcaggatcggtctcttcagcttcaggatctacgaattcatcagattcagaacgtacacgatttgaggtcaaccggtccgataagtttgttcatgatgtgaaaggtacctgagcttggtgttgcatctgttgtacaatctggttgcttctttatctattcactccctcgagcaactgcctatatcactttctgtttctcagcgccttcttctttcatgctatacgttctttcctctatccatagactaataatagttgtataatactctatcttcaaactccctaatatacatatgtatgcctctgcttttacccatctagccctctagaagatcacaaagtacttcgtatctatacatctgcgaaaactttatgaccccttcttaggctgccgccacttctaccgccttggtctcggcctcagttgcgggttcggctctggcttcgaccgcaagtcgaaatgcctttgcctttttctgttgtctccgctcatactttcgagcggcttttgaccttcgggcagcttgttgttccactgacagtaacaacaatgaccgtttatctagatgcctattcttaagtttgctcctgatgggttcagagacaggaactgatgctgatgaggatggagaagacgacgatagcgcgcggagacgagctcgttcggagagagctcggaggatggtgactagttgagaagcaggccggaaacgaagtcggggtggtctttcatccagatgaggaggtcggtccttgtctgtcagggttgacgttggcgttgatgccgatgtcgatgttaaaatctctgatgaagaggcggattctagattgagagtcgaacgtcagctcttctgatcatctttgaaacctgatcaaaaagaaagtaacaattgacggagaaaacgaaccagtctcaggtgggtcttctttgttcaagtcgttgtctaacccattcctctccgcctctaccgtagctgccgtcgatcttccttcttctgccgccttgactttttcccatctggcggcaaacacatcctgcatctcttgttttgtcatgtgagggggtaggaccacagacgatccaagctcttcttgatctttcctcatcatctttgccatcagaatcaagttcgcatcataagttggagatgatcgctcgatctttgtcaagactttccctgtttgtccgagaagaggcaagggtaataatcttcagcatgcacaattgtggggacgattgaagacaaataagagagttaaagacagacatgacagagctccttcaggccccaaatcaacgccggactcgactggtttatcctgcaccgtactgaaaaagctgagtttgagtcccacgatttgggtatttgagaccacgccggatggatctaccggtttgacaacggtcatcatgctgtttggttcatgtaaatcttttgcgctgagcgtgagatgtagcgtcttgtcaaaccatagaagattagcaaaaaaaattgggcaggagagagagagaagaagcaaggaaacaatcgaacctgcttgggaaactgttcggtggcttgtttcaacagtctcgagaacgcttttacacacatcgagtacgcctgatcgcccatcctggtggacccaaagaggtacttgtcgagctgagaaagggggaaatattcaagcccttgtatattagccgtattatggtaggcaacaaacatgcccgacattccacctattcgaccttggaagctacaagagagatcggcctgagtcaaatagatgaagctatatatatcagagacgagaagagagagaaaagactaacttgtacttcaagaaagcggaacgcatcatatcgtaccgctcccgctcgaagctttcaaaaagaccaacatcagaattgatttcgtagtgctttcctccctatcaaaatcgaaaattgtatctgatgagtctcgtatatggttgaagtattgaaagcgacgaaaaaacaaaacaaacctcaatgttctcgatatcatgccttatactggccgtcgctcttgtctttatatcaaagattccggttccaggtaatcgagggtcataaccatccaactgggaacgcatgacgatatctggtccctgtccacccagagataacaaagagataagactctgactcgaagcgagagcttgactggcataccgaaacccatgacgaaccttgctataatgataggtttcccgtctgtctctctcttctgtagagatagcgtcttccgatgcgtcctttctgtatcgcctcacgtcctccaccgttgttgtcaacatcttttccatgacgtgaccctatgagaaaagcgaaacaaacaaagtggcgaacttgagaggttgttcaaggaagatctgaggccgatctagaatgtgaacttacaagatccattagatgagttggctgaccaacatgttccatagtcttgtcgccatcgattccgtatgttccagttttctcgttgtatctcaaaaatattgagcacggcacggtggccgaatagcttgttgttatcggctagagagagagcaggatgtggatgaaaacaatcgagatcagagatagatccggagaatgatagagaatggaagacaaaagtaaattaccaagccaaaaaagtgatagctcagagaagacgtgtcgaccggccgattgtttgagagcgcgaaaaatatttgagaaagtgaagccgttattgaggaggtggagccgaagaatgtgcattcattgtcggaagctaactttgctagcgactataattcacaatgaagaattgaggtaagatacaacattgagtgcgtgatctagagcggagcgatctcctcataaacgaacattataggaaagctagaaaaggacgcacgagatcttttgaagccgtaacgtatttggatattcgagccaaatcaaactcatccggatgagcaattgcctgggctcgcttgtcaaagttgtagttgttcgtctttgggtcttggtagaagtgaactcccggccttgaggaaccagaagaggagagaaacgagcacccaaagaacaaagataatcagacactgccaaactaagaccggaatccagagatgaacagattacaaataagaggaaagaataatagaagaaaacatacttgaagagcgctttgtcgaactcatgttctaagccagggactggtgcttggccactttgcggcggtaaaactgtgtgaagaccaggtgcatctgatttagagtacgactctgatgctgatcgtgccttaaacatactttttttcaaaactaccgtgagggaagagatttactaacgggttacatcctgcacggccttctcgccatcccacgtctcctcccataaagcctcccatccaaacactttgcgtggattgacctttttgggtttgacaaagaacttatctggatccatgataccttctttagcttaatcataagttatattcacagagaaatttagtagaaggtcgattcatctcgaggtaatatatattttggagaaaggggaggaggatacgcactagctgcccgcttttttgctttggtccagagtggttttaagcctctgtttttagccttgaccatcgtgtcgagctttttctttggccagcgatctgtctttctctgatttgggagcgctttggttaaggtagccgttcgcgaattggtcacatatccttgacgttgagtggaaggtcctgctgattttcgtaagaaggcgtcttggaggaaggcccaatcctctgatgtagtcttgaatctcgatcttgatgtgttctttttgggattgggaccgagtgagcgctgaccactcatcaaacatctaggagctttggatgaggaaggtgttgagttctctgcattgaccgcttttgcggaaaactgatgatgtttttgcaaggtctttaacgatttgcgcagtgcggtgttcttttcgtcagaactcgcgcttggcatgctaacgatcgactggactacttcaatcgtctggctagtcgtcttgatcactggcgcatctgttggaccatctatcgtggtggagggagaagtaagaagtggtgtcgaggtaaaagtatcggtagtggtgggagtgggagtagggattgaggtagaaaccgcgtcatttgttttctgcgatccgttacattcttcattttgagcacggtggtactctttggttggtttaattctaaccagctcacttgatgatgaggttggtgaaaaaccgtcgatcgaggaaagtttggactcttggctcggaggatgatcaggttgagctgggaggaagaagaaatgaacagagtatgttcgtacacaatcagctcgtcattcaaggcgaacacaccatgatgatagcatagcagagacatggttaccattgatcccactctctgcattctcctgagccttactagatagagaagatgtggcctgaacggagggtatcgatatcgaggctggccgtgcgagcgggaagattatgggtgatctgttgatgacccagtaaggacgggcgaaacatggacggagcagcatggtccttctggaacctcttcctttcggatcccttctttccttccaggagctgaagatgacgagatggagagagaaggagaatcctttcctttcgttgctactctttgggatcggacgaggtgggaatggaaaaggtaccaggaaccgataatttcagaaatcaggaacacgccgatgcggggatatagatcacgtgatatttggtgaggtattacgtaatcatacacctctcagcgtacagcgataaatcgtcatctccttcccgtttagtcgcatcctcagtttgttgcatgttctctcaaagcagcaacctttcaaccagcacaacattcactcgataataatgtcagactcaatgtatcctcctcctactcatccctcaacattgttgacgtttcctcaggctaccctttcccatcatctcgggacacacgttttcccgttatcctccggttcgtgctccctggttgagatcatatcggaggatgaggacaaggatggaaagaccggtggggcacctaagaagcttcttgcgctctccatgcagccaaataccaccgttcttcttggaaaggagaatctggtgagaaagaccgaccagaatgaggtagggaatcttcgatatactctccttcacttctcgtcgcgcactacaccactcactctctttgatacatacacacatgtatacaaatctttttagtcgcacgcctcgtattcttttaacttttctccctctccaaaaaatgttccttcgagctcttctgccggtggcatgctcccgacatcaaaccaagagattggaggctaccttaagctaaagctaccccagcctaagaacaacgacgaagtatgtatcttgcttctcccttctttctcttcccttgacccctcacttcaagctgattcccttctactacctatgaaccgcaaaaatagtatgaagacacgacggcgcttgctcgaaagtttgaatcgtaccttctcgaatatcaactgctcgacaccagactcgacgccgacatttccgaggatgacgacgaaaatatcgggtccgtcctttccggctgggtttttggctccatcgcaggcatcaagcagacagcgggcagcgtgtttagaggtgcaaaagagttggtatttgaggacaatgcgaatggaaaggataaaggaaaagcaagagaaccgttcgttactccttgttttgtcctgtcttttctatcttttcgttctgtcagtagactgattttaaaaaaaatccctcgtgatctatctcggtttctagtgctcagaaggataatgaggccgtttgacctctttcgactctccttcttccagtgcatacgtccttgtcttggatctttctgtttctctttctctgttttatatctccttctctctcgatctgtaatccttcgcttttttctccatatttctccctcttttcaacgaattctccattccttgatggctattccttgtctttggcttccgcccatattcttccttgtcgaaaccatgttttctactcaaaggttttccctccaagagctgaagagatttgagagatatattggttgttttatcataatcgcctctgagcgatcactctcgtttcctcaaacacacacgctccgccctcacccaccgtctcatcttgcccagtacttctactcctgactctgctcctgctcctgctcttttcggttctgatcctgaagattagcccactttgagtttgatagggaagcaggcaacttgaattcaggtggcgtggaaggctcatttgcgaacacctcgtgataactcagtggttccaggtcgtctgctggttcttctgcgaatctgtttgtcgagatcaaagcgagagaaaagagaaagaatctaggtcggttaatcttgaaaaatatagaggagaagtgtggaagagagacggaccgttgcatgaaagcaaacacttcggggttcggttgtaaactattcaaattggcaggacgataagtcaggcccaagactccaaagaaaagatacgaaaggagaaaaaaaaggaaaaacgtacatagaagccagtggattgaatcctctcagctcgatacttgagagggaggtcgctcgagagagagcgacgtatctatttttcagatagaatatcaagagaacacaaaagcattggttttgaataaaggaagcagatagacacaaagtggacgggaaaacgtgaggaactagacgaacgcttggcctcgctcgaatgtgtttctcaggtcaatctaggaagaatagataaaacataggacgggattagaccgaacgacaaggagaggagatagacagtacggaagaccaaccttaacacgctgtaaagtctgaccctgggatttatgaattgtgatagccgccgccaagaccaaaggatactgattcctcctaatcatcaccattcctctcgagtctctaacctctccggcgtatcgtgggatcctaatggtcgtaccatcaatgaaactgacaactggatcgcccgattcatgaaacgagactactttgccttgtaaaccgttggataatcgccagatatcttccttgtcttgagtaggggctgacccaagagatttgatgcttcctgttgatttgatgtccatgttcttgacaaccatcacggaaacgccaaccttcagcttcaacgtcttggccaactttgtgtccctgatcgaaatggagaataagaagagattcaaagggtaagaacgaattagaatatagaagtctctgtttactccaaccaaagtgaaaatcacactaactgctcgagtttactcgtcagcatgtgcagatctccgaacgaagccttcttgctaacaatgtttttacgaatccctgagatatcgtcaaccgcctcaaatgaacgttcctcagcctttatcgaagctagatgttcttggttccttctctccacatcttccaccaatgagaacctgacgttttgttccaggagtgagggatacgatcagaatgattgtcgaagaacatgaataaaagacaaagagagcgaaaggaaaaggcgacttgcaggctgataggctcgatcccgtcttcatagacaatctctctatccaatgatttcagagtctccacgtcctgcattgacacctttcctagacgtaaccggttaagtagaccaacgaagaccggatcggcctgccgatgaacttttctaaggaagaaattgttggatttcttgatgaccgcttgccaattgtgcgcggtaaaagcaaacccgcgggccgcgtcggtttcgatatctttctcaactggggggagctgagtgttggacaagagtgaaacacgtgtatcatgataagcttcggaatgagaggaagaactggaaagagcgagacagaataaactcacctggtagaaatcaccggcaacaacgatctagatggtccaatcatccgagtagaggttaaggagatggaaaaggaggatgtgcgtccgtcagcttgtaatcacaaggagaaatctaatctgcagacacattgaaatgaatttacctgaagaccaccaaatggaaggctgttatttctaatatcttttccgagcgcatccaatctatcgaataactccgcgctcagcattgacactgattcatattcgtaaacgagaagacgtcgacttgatgagcaacagtttgatctgtagaaacaagcatgctagcaagtggaaagaaaaaggaagcccaaccttcgtcgatgatcaacacatgagtacccaaccacctctgaatggcaaaatctgttggggttgaaggtctcggtttcctgagagcggccgtttccttcgttgattttcccttcactgaacgcatgtaatcacgaagggcatccactcggtcgatgcattttgcagaactgcttcggaccgagactctgagagattaatcgaaggtcaagggtaaatatccattgatgacggaagggggaacaagggaaaaggacacaagatttacccagcccaagagtgtaaagtggaggccattgaaattcctaagttctgcgcagcaattcccgttgtagcggtcacgcctactacctttccgtcctccttgagtgccctgacgatcgctctcatcaagacagattttcctgttccggccgcgccggtgaagaaaacgttgtgacctctacggacggtatcgaggatctgagactgttcgtccgtcaacatcggctcgttcggcggtcggctcttgtcctgaaaaggtggcagttcgatctcacgtcggatgaggggcgtggatcgtgtatgcgcaaagtcacatagtgaaaggagtggagcgaggctagaagtagaggagagaggagcaaagagtggggtggacgacggtggggtactaaagtcttggggaaacagcgctttgacgtgaactatcaacacgaaggaggaagcatgtatgtgagaggacggtcagccagtagggacgagcggtctatggatagtatcctttgacttgatcggaactcagacggggggaacgtacggtcatcggcaaactcctcttcggtaggagtaatctctctattgctataatctggatagaataccggttcaggagctagcggatatggccggaaaggtttgttgcaagaccatacagagaaggagaaagaaggaaattctcgtcagtcatgatgaagaaatccaaattcaagaatcgacgatggaccaggcttccgaccgaggtgttggatgggccttcttaccatttggctcttcaaccgtggcgggtttgatgggcgccggactttctgccggcgtgtactccatctggtggatgtctggatctgttaggatgaatggaatgatgagaacgtttttagacaactcactgcgcactttcttccttaggtatgatgtttcatcaccagaaacagacgactgaaactaagacctactgtatggctctatcggtatggccaggtcgaacgtcgagacccgagtgggtgtagggcgtatggtggatgatctacgagcaaacggaataagggactgtcgtgatgcagttcccgctctaactagagcgcatgctggggagaacgaccttctgagcatgtcctgttgaagtcgacagttggtgtggatcgaatgaggttattgcggtgtgagtgtgtgttctctcttctatatgtaaaggtgaaaatccaaaaataattagaaaaaaagttgtggtaattatgcgggaggtcaaggttatgcttttgtagatcacgtgcagagtaacaagatgcccgtggttacgcttgcatgcatggtcgactgtgcaccgggccgccgtaccttgcaaaggttccttgtttcggattccgtgcctggtttcggattctgtacgtgttcctgattctgtacctgtacttgttcctatccctgttcctgttcctgattcttcgaccatccaccccttcatcccttcgtgtttcccttcttcttcctctttgtcgtcctctagccaatccttctagtcgtatacactctggacaccctccgctctctctcaggatggatacctcacggacaccgacatcaccgacgggctcatcctatgatttgttcatttcatcattccactcgtcaaattattcctccccatcagcatcagcatcagcatcatcatcagcatcgtcctctgaagacggatctcctcgggcttgccagtcaattccatcaacagacaaagacaactggcttatcagaggggagctcgtgctcgagccagaagacaatggaacggagctatggagtgatcccgaaactcgagagctagaagaaaccgagtttctttcctcagaattcgaatctgacggtggacaagaagacgacagtttcatcccctcgcgtcgtcgttaccaacctcatcaatatccccaacgtcatcatcgccatcaaagacaatcgtccagatcgctcaagcattcttactctctaggctcgtccagcacgccaccaacaggcaacctaaccttattttggacgacgctcaaccttcttaacacgtcattttcgcccaccatcctctcactcccttacgcagtctggcttctgtctcccgagttgttcataccaatgctcgttgggatctcgctcataagtggtgccagccatgtggtcattctctatctggccagatatttgggaatcaagacactggacgatcttggtcaggctgtaggcggagggaagaccgttaggttaggaatgagggttcttactgtaggtgcaggggtaggtgtgttgatgctgtacctccgaagtaagttgcttctgtccagactacagaaacacatgctatctgaggaacaagctaacgcaagtatgtgggttatgatcattagtgactgcggacctgatacgtccgatttttgtctatagtacacctctctcgtcagtcctacagtcatcggctctttgggcattcttggctagcgttctggttggttcttagttcttcacatttatcttttaccttccgagttgagtttaacaattcttgtctcaatttgggctcgctcagatcgctccgatcctcctcgcctcccaacttcactccaaaacgattatccgaacgtctcttctgtcaagcgccttcccaattgtgcttttcataatcactctcgtcaagatagtcgcttactcaaagaaccagacagaccctcccgttcctgttgaagcctcaaggattcagttcggggagcttgtaggtgggaatggaataggtagagggtctacctggggtggaatcggttagactcttctttgcccgatggctgcttatgtgtatctgaccaggaatcgtttaagcctaacctatgtctttttttcttcttcctcttctcttcttttcttagccctaatcacgtttacacagatgtctcaactgacaacactacctaactacgcgactcttctccagccctctcagcgaacgttcttgctctctcctctgcttctttctgtactctccatcgccttgaccctcccgctctctctagtaccatactttctcctctctacaccaccgcctcctaacatcctcgatatccttccttctgccgattcatggatcatcgtcgctcgcttatcgggtgctggaatggctctctctgggattcccatgctattcttgcccacaagagatgttgcggtccgagctttcaggtcggctggtcttaagactgtaggtgggagcggattcgatggacagggcaagaagcggagagcgttctggacggtcactgccatcggatggggaggtgtcactgtgctgtcggtagcgggagattggatcagcaaaaagggagtgctcagtggggtattcttggggttcttacttagcttcttcatcccaggtgtgtgattctgtctcactctccttttcttaagtgttccactatgattcaccgtttctcctcaactcttggaacagccattctattcgtcgttctcttccaccttcgccggcctttctctatcattttccctccctctaccaacttttcttctcaatcgacatctacatccagttcttctcccaccgcgtatcttacttctggaccacaggaggctagcttgttgacggacgttctgttggctcaaaaggaaaagcagcttcagaagagaaggtctggtagaagaatctggcaggatgctgtggtgttttttgggatcttgccggttggtggggttgtctgttgttggtcggcaggtcggctttttggaggatggtaaaggggcttcaatcccttcagacacgttcctttcttttcttcttggacaccttactctgtgttatcttgggacgccttctgcacctcttgcttgctcccgttgttaattcaaccagtcgacttccatttcttgttcttggccccacttcgattttttctccttatcttcgtttcgattatgcataccctctacacatatcattatctctttctgctatccgtccttccggcgcttatacttttggctctgtgaactttgcctgtcttcgttttctctactatctaattctttgcggtccttcatctatagtcgtaatgtagacatatacgtgttctcgtgatatcttatcgttcccatcagtgattaggtaatcggccgcgctcatgattcttctccattagtggccgttcgctaatcgatccggcgaacgacgacttggaaaccaaagaaatgaatcgtctcgtctgtcaatcgacccaacgaactcaagctatacgtcccggtttctctagacggacgtttaacattctcgctcttgagagcagcgcggacgacacatgtgcgtctgtggtagatgactcgagaaggatcctgtcgaacgtcgtttggaagcaacatgagattcatcaggcatataaagggatccaccctatgtacgctcaacatgcacatgtgagagctatggtgagttcagccaatataaacaatttgaacaggatcttttaacatattctaattatgtcgaacgggtggattctgctggtttgtttcgcgatggaaacctgggggtatggacgagaagccaggagttatcaagcaagcactgaaagaagcaaacctgagagttcatgacatcgacgcctacgcgtgagtccagcttccttccttttctgcttttagagcagagaacttcgttaaaacaagacaagaagcaaaactgaaagagagttgagtttttctctcctgctttgttcaatgaaacccccctgtaggttcacacaaggaccagggatgtttaattgtctgtcggtttcgtgtagctctgcgtctgcgatggctgctcttatgaacaaaccgttgatcggagtgaaccacatggtaaacctctctgttctgctcttctctttgtcttgaaaaatatcctgataccttgcttctgttgttctacttctgcttttgttttcgacgaaattcttgtatagcaaggtcatgcgctaacaccattcataacggaagcgaaatcaccagaatttccgttcttgacatgtcttatgtccggaggtcacactcagcttgttctcgccacttcgttcgatgagtttgagatcttggtcgatactggctcattggctattgggtttgtctgctttttt

SEQ ID NO: 3087 - DNA, 6480 bp, Xanthophyllomyces dendrorhous
gggtttgtctgcttttttttttggtcccctcttttcttctcttccttcttcttttcccttctggacttaccgattttctactttgggcatacatgcgaacaaaaaagtcagtgtttcgaccgtttaggcgctgctctggatcttccagccccccaaggttacggacccgcactcgaatcacttgctctttccctcccttcatcggaccctgacattcctcatttcgcacctctccctcttcctccactctcctcacccctattcgaattcagtggtattctcttatcgctccttgagacgctccataagatctctcctggttcggatccaaaagcaaaacattctgtcgacccaacaggaatcaaacaggccatacaggtaggcgctgccagagaatttcagaggtcggttggagaagcttttgtcagaaggatacagagttgtttggaaaagctaaaagaggatagaggagtggtcatcaagggattggtcgctagtggtggagtggctagtaataagtatcttaaacaacggttcgtccgagcacactctttccccttctctttttgttttctttccttctttgttctttctcgtcatagtttggacgtgagtcggttaaaaatgtggtctttgatttcgcgtgcttacgtatgtatatttgatgaatatgtcgagcgtagattccaaagcttggaaaaatcgtgtggtttgagagtgatgttccctcctatctcattatgcactgataatgctggtctgttcctctcccttcctttttcttctctcttctcgttctcgtgttaagctgatggggctttcgtgttctcctcggcattcctttattgacgatgaaatcaatacaaaacagcgatgatagcaaacgcggcgatccatagatacaaagctcagtcgttcaccgatttatctgacacattacctcggaggaagtggtcgatcgaggaactaagtcgaccagcaggtccgtcgggcgatccggctgttgaggctgagaatagagatgcgggtgggagctgaagaaagtgaagaggtataatgatacatgcatcgggtatagagattgaaagagcgaattagacgagagagatgagtgaaccaatatgaagatgtaagggagtggataagcgaaagggcaaatgcacgggtatatggggtatacgaacaataatatgaagcagagcacatcaagatggaggagaatagatacaaaaaggcagtagagaggctgtcttggtataatgaatatgaaaaaatacgtccatttttcgttctattgttctaatgcaaactcgttttttaagcagaatacatttgccaatcgaataagaccggagaagacccccaaaagccagccggacaggatcgagtgacggtcgatccaccgagcggaaggatggttgatggactatcgaattgcttccagttggtgtatgcacctctgtgttattttccgagaggttcaggagaggaatgaaaaaggaagttcgagggattagtcgttctacctcctattaggagggatgtaacttaatcaagtagaatgagaaaaggtgagacggacccgttaggcgtactgtcccggacaaagctaccccaccgggagacgacctctgcatttgacccggatgaacctgtcccaaacacgactttaatgtcgtcctcgtggcagaccaagccggtacagtatgggatctgttggttatcatcgtatctatatagggaaaccgtgtaagcatcatggacgtgtccgaaagaggatagagaggactaacggcgatccggcctcaaactccccgacatagaccgcccctccttttgatttccaaagtgatgcggcgtactgaacagcgcacgtccacaaaccttccgttccaacctggtcgagacgtagcatcaaagaattcacccccatagatacatcaggtcagctgcaggacgaaagaaaacaaaataaggcaggacgaacatcaagaagagcagtccgggtagcatcgccgtcggttcctaacgggtactccagggaattaaggatggctgccgatttgtcagattctctaaagacgacgctaagctcaggtgcatagtacgcgcttggcaccggttcagggttcagagggcctttaaatgcgacaaaatacgatacgatcattagcttatgacaagactgacgcgcccggctgaacaacggaaggaaataggacgcttaccgagactggagccgaattcatccttgacggtggttaacaacagaggcacactcagcgtcccactgggaagactaccggcctgtagagctttgaagaaatccatcggaagggtagcatccgagctggaagccgtcggtcggatggattctgcaaggggtacagaattatccagagtgtaagcgtagctgaggaattgggtctgagcagccacaaggtcggcggcagacatctgagcagtgctatttgtgagtgtggagtagaaggcgttggtcaggatggaggtcgtcgtaggggtcgacattccgtatgtctagatgaaaaagataaactggttgagaaagcgcgcgcagatgatttgaaaaggtaaccaaatcgaaagatgtcgaccaaccataggatcactttggaggatagccgaatggaacaggcctgaaaaatatttgcagttacaatacacgcatacacacaaaggggcagagttgagcactttgctggaatattcgccacatcctttcgaaagcatatactaacctttagcttgagggctggacagcaaagccctgatcatgtgcgctcctgagctctgaccagcgatggtgatcttgttcttgtttcctccatacgaactagcgacagagcgcacatatttcagagagtttatgacgtcacgaacggcaaggtttgggctggaggatgcgttcgcaggaggaagcaaaccgagaacactatgagtgtatgcgcgcgcacataatgaatgattgaaattcggccgggtatatgaatgagtgtgttttcttctgtccgtttacttccgggtagagatacaggataaagatatacttaccctagtcgatactgagtagaacaacagtatgtatggagagaggggttgttcaagacagagacaaaaagataaaccgtcaactttgtacaaacaaacaaggtggaacaaggccctcaccaacctgaatgaccacgacgatcacatcgttcttaagagcgaacttggagccgtccaagccaggcgccgaggcggaacctgtgacgaaagaacctccgtgaatccagagcatgatgggaagatcctttgcgctcggaggcgcgtaaataactaaggagagacagtcttcagaggaggacgaggtggaggcgacgtttgatgcttgagggcaagtcggagggagcgacgttccatcttgcctgaagaaccagacgtatgatgctctgcatagagaaggaaagagtgtatatgcataagagagagctgagaaaggagcaagaaggaaagctgacctacacgttatcccaatatgtagttatctgggagtctttccacctattggcctttgcatacttgacggtatatctcgtgacatcaccggacaccgagccttgaacccaacccagcgaggtgaacacggactttgtgtttgagctattggctaaagcagcgacggacgagaccgactggatgaacagtatcagcgggaacaagagaccggataagaacagcatggtcgagtggatttagggtatacgtataaggaagaaagaagaaaagaaagggaagaggcatagctcagacgctatcctttttgtagtttgaatgcagagaaggttaggaggaagaaaaaaaggtgaaaggtgaatttatttctcgttcctattgatcggaaggaacgtgggaaggatgaaaagatgggcaacgccgtgaatagacggatgggacctgatcgagttagtcgacttcaggaaccaaagtggtcaatcaggcactcagacacagatgaccgacagggcggtcagtcgacagggcggtcaaagtgcagtcaggcggtgcatatcacatgcatcagtccgctagcggcccgagcccagggacccatgcatctatgaggtcagctcaatcgattgaacagagtgttcggtcgaagttcactcgacagggtgaaaacgaacgggaactccatcaaagggagctgaaactttgtgagtcagtcaccgaacaaaagattataggaggaatgaaaggagcaggacggagaggtgagcattaaggcgcgggttacagtataatcgggtaactactatagttcattcacacttgataatcaatcacattacaacggcatacaactaaactattctattgttctattgtccttccccgccctctacctctgcccctacctctaccacgagtagatttctctctcaacggttgctcatcggaaccactatcgctagagagatcactgctccccttcaccgcgtccttctttaccatctcgtcctgtccagcgtttccagactccatcttggcgatgctctccctgaagcgctggaggacggactgcatacgcttgctcggatacgcgtttctcaccctgggcgcgaatacctcatgccgaccgccggaagcatcgaagaatccatcgagcgtgccctgtcggttcgtacccgccaacacgccctggcctcgtcgagcgatccgttgaataatcggcaggagctcgtcgtcaaccttagagaccgaccaagataactcttccgctagatagactcggagttgatcaaggtttggaaatccccaagcaaaaggctcggtcgaagaatctaccgtcggactcagataggctggtctctgaagaggagcagttggatttattcgagtagggtcagcgcgtaagaagggcatagctagacgcatggatacgcagtacacagcagataagaacgcaccacttgtcgattaggaaactctgccaccgtcagatgtaaaccagccttgtgtttctttttctacgatgattttagagaaagagataggcaatgagcatcattcggaacatcaataaactcttcaaaaacaaacactcacaaatgactttttccacttcgtgttcgtgtcggccgcggtgtccatcccagtctgaaccttcatccaccaattcctgaagtcgaccaagccgtcatctccgttccctggaaattctgccaggacctccattgcgctcacataacccactcctgggataccgggtgtatagtccgagccgagaagaaaggcgagcgagatcaaccgatctctatcaagggatagctctcgagagatatccccagacacgtagcattccacatacttgtgatcgttaaataagttcttgaagcaagtctttgccccaaacagaaatacgtccgagtcatcggtgatcactccgtcgactagacctagactcgctagttctgcacattgcgcctcggcctccatcggcgccgtcacgtaaggaatgccatacaaccgaagcaacacctggatctgtgacgtcatttgtacacttacattctcgtccccttcgctcgtcagcttcctcctctgcgcgttcaacacattaatctctcggtcaagctcggcttgaacctcggccaggtctttacctttgacttgagaaaggaatcgtgcatatccgtcttcctctgcatccatgtctataggttcatcttctgcatcggagggtggggcagagaacgaccgatcgaacgacttgtctggtgagtcgccaaatgactgatcttcctcggcgattgcgtggatattcatcggagagcttgagcccatcgagctatcgctctcatcttttccccctccagacggaaactgaacagattcaggtcgggagatacgaggcggaagatcggaaagcaatggttctctcccttcttgcgttggtgttacgtcaagtgtagctgtagagtctttctctgtggtgatggtgggagcgatgacatgggcaggactagaagataaatcgggttgtatttcttcggagggatgcacagtcggctgaaagcccggactcgaaccgatcgtcggacttttatgtcgatccgtaggcggtgatggaaagggttcttgaacgtcgggtgacgtcaacggtatactctgagtagaaattgtcgttggaaaatgaacactccgaccacccagagatccacccggagtctccttcgttcgcttgaccgccggagagagatcaagcttttgtgagttacctatagaatctagaactttgaactcgtccttgagctcgaacgagtcgtccagctcaaacacctcttcttccggcttacttctcttgcgaggagacatgatcggtttagacggcgtggtggtagagatcccgataggaaacgtctggtaggagggtgaatgagagatttttggggttggggtcgtgaacgtgtctgttcc

SEQ ID NO: 3088 - DNA, 9960 bp, Xanthophyllomyces dendrorhous
gtgggacgacctccgggcggataggctacccgaggatcgttctctctgttcgctctccacctcctccgctccaccgtccctcttttgagaagaccaaccaggccgaggcgtcatcaacgggtcggagatcttcctcgagcttccaaatgaatagctcttcggaagtgacgatggaaccgctcccccaatggacgaaccggatatgcttcgcttcggtcctcccggtgttcgaggcgacgcgctcggaataggctgaatgcctgaaaacttccgggcgatcgacaggggagagagaggtctgataggttcttctggtggtggtggagtaggagaataagtggttgaagaagatgaggcttcgatagaaagaatgccttctggaaagagaccgtccgatagaggctcaaacacgtcttgtggatctggctcagagctcagaatgattggatccgattgttgaggatgtgaggtcggatgaggccgatgttctgatggagcgaccatctctaaagcaacctcttccatgtcctcgtcatcgtcttcttcagatccgaggacaaccggtacgtcctcctccgccttcactctggctatcttccgtgtgttgtcttgcctggagagactcaaagctcttcgtaaatcctcatcctcgtcctcagctagtcgaatagcttctaccacatctttatcttcttcctcttcttccatctcatcatcttctgaacctggagcaaacagaggagcagaagtcatcggcctagtcgttcctaggactcgagcagttctggggattggcttctgggtcttgagaggggaatatctgttcgctaaagcctccatggcggcttgtcgacggtttcttcggaaatcattatcttctaaagaaacccttctcctgttcatttgggggttttgtaatgctttgatttagtattttttgttcttgtttataacaataagaaatgaactccaaaaggcgcaagagaaaatgaactagttttgagacagacctttgatccatctctaaggcttcatcctcttcccctggactttcatcttgatcaactaagagcattccatccttaatcaactttcgcctctttctcctttcctctccttttctaatctttcgatcccgctcgatccgaacatttagatcctcctcttcttcgagatcaatcggcttttcttttgtgccctcttctctaataccgagcacccatccaccgccttgttcgttcttcatcagcacatattccctgtttttttcattcgccatccgtactttgacatctaacgaagcagcctggctctcgatccctgccagtccccacatctgttgagtgagtacgttcctcgcctgtagattctttatctgtgcttttgagaaatccagaggagtcttggaagaagtcaacatcgactgaagtctcagatgggaagacgaccgagaccggagacgaagatcgttgatgatctcgtactgaacttccgcaggaaggagtttgaagtctgaggaagcggtatcgatgtcatcgaatttcatctcgtcgataaactctcggagctctgcctcggttgcaatccgggggtcttgtcgatcggaatgcatcgatcgaccgggtaggtcaggaagttgatatgggtctcggacgacatacttctttttagcggattctgtcgtcgtcttttcttctgtgaccgggcttgggtttacaactggatcaacagactcatcggatgaagaggacaaggatgaacgtcggcgacggcgcggagtgagtcgtgaacgggaagaagaggcttcggatggtgggggtccctggtgatagtcacgttgagggggtcggtcatagtcatccagaaagacggcattcttaggaatgatcgctccggtgtcctgctcgtcattcttgtctggttcttggtctttatctcgtagttgatcgttttctaactcccattctgcctcatcctctgggtcggatatcggcgcgctcacggcacttaatgaacgctttagggctcgcttcctagaaaacgccaacggccgataaggattgaagaagaaccaaaggccagatcatatacatcagacagaagttccttggtcagattcaaagacgatgaaaacatactcttgagcttgtctgattgcctctctcctgagttgagcgttgaatattttttctgctacttttacgtgactagcggcgacgcctgctttccgttgttttctctcggccttttgatacacaaaccaaacaaccaagaatatcagaggctctatccatcaccagccagaacttgacaagttatgaatggaaaaaaggaggaagaatttgaaacgagattgatagaatgaaaataaaacaacacacacgattgtcgatcgttttaaagcgggtgcggcaccatcaaagacaaacactggtttaattccgtggaagagtagcttgttgatccttcggatgaatcccaagatatgagcgttgacgagcgttcgaccttgtttatccttcattgtggcttggaactggtcgatccgggatggtacacgtgatcaagttatatgtttgaacggttctgaaagcggatgaaacggagaggagacctacctgatacatccaaatactgcgttaaatgagaacatacagacgaggcccagtgatcagtcagcaagtcgacggagagaagagaatgatgggaataacttacgacgaatcaatcgctagcttctttccctctaaagtttcgattctgattcatccattcagatagggtatcaaacacaaggaaataaacgatcgttgctatcaatcatctgagcctgaaagtctttctagccgtgtgtgagagcgaagaagaatcctttgcatacttgatgggccgtgctactggctgaagcagctgccagagtcctttgactcccattatgtgacgttcacaacaagatgatgctgttctctgtttgcttggatggattaggtgatgtagtcgtaggaaatgcaatgttggtctgatagaaattgtgtacaagatgggaacgtcatcgatcgaagggctgatcgttcttatggttacatcattagggttacaacatcattacagtttctgggcactcgctctatcagccaacggcgagacggcgtgggatggcaaaaagtccaaagatggatcgtcgacagcatggtcagcagcgtggtcaatagcatgaaccgtgcagacgggtattgagtgcagtcggataagatcaccatgaagaaagaggttgtgtgttatgcccattttatttacccgcgaacggactccgactaccatccctcttctcgactggagccgatcgatactgctctctatgtttttccgaaagatactccattcggagcttatccaaagccttgtcggtcattctgaaaaggttcatcataggtttgaagagaaggtagaacacaggggggagagaaaacgaaggtaaaacgcgtcgggtgcttagcataatcggggacgtgatgtaaacggagagagtgtatgtgttgtcaacccgggacgacgtacaatggactcatgcattcgttcatggctctctgttgaggtctgcatgcccaagcgattgatactagtctaggagcagcgcaagcggcgaaagctggtgggtggaatgtcgtccaggtcgcagaaacgtcaagttcaaggcaagaatgtcagcctatttcaatcctttcacaactcattcaggcctctcggaagttgatatgtaccacgagcagatgccagcaaagaatgacggacaggggatctgaaaggatagaaagagaaagagaaagaagacggtagaagaaagactcaccggcaacatactctctacaggcatcccttgcactggcctttgcgtctttgaacagagcttcctcctctcttctagacaaagccgacataccggcaacctctggtggctgatactcctgtctccatgtgaactttttgtgtgtatctgatgattcgggctgggacatgatgtatgtgtggatgtatatgcgagtaagtgaaagctagcgtatatatgtatatgatctcggcctaaccgtcggcggggaagtgttcgttagggttaatccaggtgtgaaagaaacgtctcagtcacaaagaaagttttctcttcttgttttttgttcccttccaacaaccatcccgaagcaagtctttgtactgctcctgctactctccttcgttccagaacaaagtcctcttttccttatccatctttacatgcccgacgacgaacctggttgtagtggttattctcaatttatgaaagccagttcctactcgtgaggttttttctccatctgttttcttttcttctttccttatctttcattttcactttcacttcttctcttgattccgttccttctcttgggtaacaccaccacattatcattcgttgttcgtccttgcttaccgtgctttctgaatgcatccgtctttttcaacacaatcgtcatcatctctgcagtactgcacgaacccttaaccgatcttcttctctcgttcaagacctgctctcttccggtgaaaagccaccctaaggaccgccactcgtcatccaaacaagcctaacctttggtcatacacatcgacctcacgtagatgggttaaggctcttttcttctacctgaatatcccccgaaagttcctgtttttcaaagaacctgatagatacacactaaacgaacaaagctccacaaatatctaacaacaaaaaatacgacgcatcctattggatcttaccttccctcccgcctccccttctcttgactccagccctcgtccttgttgatcgttcctacactttctccacttctcctaaacgattccaaatacttctttcactccaacatggtctttaaagctccgttccctctttcgaccttcaagccgctctcccggacctcttctcccgctccgacaaacagtcgagcctctcccgaactccctcctagtcctcctcggggacgcccctcgttggatggtccggagaacaacgagaagcgctctcggtccgttacgagacccagacacattctttccctttctcgttcggcaacccctatctccactcctagtccatccccgcagatgtcgtcgacgcctcttccggcaggatctgctccgttggtcaacggctcgaccgagtccgtctgccatatcgagaccgtgggtgaaagactgagcgaggccgtcactaaagccttggccggcagtctgacggccggagagttcaaaggccgaagaggtttggcccgaggaagcggtcgggacgtagccacgatggtgatcaagtaagccgttctccgttcctgattgacgtcatagggctagacaccacactcacacaacttcttccccatctattcgtacacagagagtttccagctcctccggtggacgtctactatttgcgagccatcgtccgcgtgtctgtcaagcacttgtctgtgctgtaagccaactctcatcaattcctggttttcaagcttcctgtgactgatgacgtctgactgttggataaacatacccagtgcttcccgaattgagacacttctcttgcccgccattgtcgaccccacgttcgctcacccgatcctgtccacccctttgcctcctccttctatccggctgaactcggtctcgcctatcttggcctcgccattcaatgcctgccagacttactgcctctcattggcgcatgcagcgttcgaagttagggataccctatcgagctttcttcatgccgaaccgggcgagaacaagcctcggtttgtcggtgacagcttgaagcctatcttagaaaagttagactttattatgggcaaggtcatgcaacctttgctcgcccggctcaagaaggaattggctgacaccgttcagggcctgaagactgtctcgatctgtgcatcgggtaaaccaacaaaggcagccgctccagcggaaccgccaattccctcgagcctgactccttttgcgtcaaaggtcgagcacgcccaccggtgtctcgccaagatttctgccaactgtggagacatcggggaaggctgggtagtcggcgtagtcgcctcgactgtctggagagggatggttggtatcgttgagcggccttgcccacctggagaaaagtctagcccgaagggaacgaatcaaaggatgtcgccagtatcgaccccatcggccctcggctcgactatggctcagccaaagcccaagccgaccaattctgtcaagtcgtccacaattgtcgcaacgctgctccgaccacctggctcccgaccaccctcgcccagccggccagttgtgacagatccgagcacgatcttggtaagctcgttcgaggtgttggtccgaaagcttgtcgacggtttggtgccctatgtccttcctgcatcttccgaccctggtcatctcgctcgggaagctctggccgaggcccttgaggcactccaatcgctcaagattgttttggccgcgcttggaaagccaggcggtctagactttttgctgaccgggctggaagtcctcaagacgtcctctcagacggcagccggacaggtcgagcaagatgacagctttcttgacgccttggatgatgtcccgccggtgttgttgtttcacctttggggagctcggctgagttctttgtctggagcagaggagcagcagcatcgaccgatgttggttggatctccccataccttgtttggctggtcgagggaccaatacgatcgaaccgtcctcgccggatttggctcggccgaagagtgggaacgaaaagtcggtgcggcagtcaaagctgaggtggccggggtgttggcaaagcagtcaggatcaatgaccgaagaagagagaaagtacctgagggcgatgtcgctcacggtggatgtcatttgatgggcgaaaagccaacgactttatgaagattgttcttttttttcttttcttttcctttctctctctctcctctcttgtgtctgtccttcccttctttcttctctgaatatctctcggcgctgcctctacttctgctctcctcgctctcctccgtctctgcgtatgagacacaacttttgtaaacgagagttcatctttctatctatctcttttctcttctctctgtttgtatggcagtatacactctcttgcctggtaattattgcactcgtatgagatttctgttgccctcttgttggtaaagttgaaacaaccgaaaagacaaagcccggccgagaaatcatttgggccgacgaggccgataatatgaatttcctattcttccgctcttccgcatgaccgccgccggatttttttcgaaggtgagcgaacaccttcaacgttttccctttcctttccttcctcctcttgtccttctccttcgttgtctctatcgttcgtgctcttcgttctatagactacgtcctagtatacacatataggatacaagcacatccaagaaaggaaacacgtccaaaacacacaactgctgctgctgcttccgctttcgacctctttgtagcgcccagtacgtgttttcctatctgatttatcttccctcttttgttaggatcatgatagccggatcatggttccatgttatctgcacacggcatgggttctctcactctctctgcttcctaaccgaactcacccgatttgacgaagcaaaagcttcatagaagacaaagtttacatccaacatccaacagccaacagctgacctctcttttgcctgttcttcccctttatctatctctccctgctttcggcgccggcttacgtcaataacacttcactcgctatcactccactcgactccatccagcaggtcgattcgatggacccaagcctgtcgaacactatcgaacccgaaccaactcagacaaacctcccgtcttttccaccggcgctcatcaacgaactatgctctactatcttctccctttcactctcggtctctccccagctgtcgagcatcgatcctcggccgtcgccaaacgatgaacagctcacccggaatactcttctcgcgctagcccttgtgtccaaagagttctactatacctcccgaccttggctctggaggacacttcgaatttgtaggccgagaggttgggtcggcattgttgacaagattagcgggagcgatcaggttgacatgtttacaggcgcagatggcaacttttcaacaggtcccaaccaagaggcactttctaggtcttccacatcaagctctctgactcgtgggaagcaaccgatgattagagcctcagacgaccaggccgaatcagacagacaagaccaagagccatccccttcatcctctgggttctccgtcttttccgccccgcccctcccagggatatcagacagacctcacctatcactagagagacggagccactcgattgaacgtactcagatttatattgacgctcaggcgagcgctttaaagaaatccgtctcgcttcggtcgacctcgaggtcttaccatcagacgagccggtctcctctgtcgtcaaactcaaactccccggagcgaggcccaaggtcctccagtgctagacgacctcgtcgaccagaagcctcgacgtcaacctcattctctgtgttcctgcctcatgacagagttgtctcagagtcatcctcgtccatttgttctggcatgccggaatccaattcgtactcctccattgccaccacctcgacttcggcgacatcggtagcgacggaagacaccgaacctgcagatcaactcactatccagcaaacgggtagctggcgagggcaaagtccggagagagtgggtagaagccggttcaagcttaacattgcatcgtccagcttgagagcgagtagtctcgatcatcatctggccgagactatcgttgaggaccaatgtacgttggagtcacctcgctctggttgtatactcgtgtattctactatatgctaaatatctgatatcttcttcctctcttcctctcgctgcatacagactatcctattcctgtgccacatcctactccgcttgttccagtatcaatctgttacccgacatcccctgtgccgtcgatctcgtcggatgagaacccatggggccgacctgaacatctggatttggccgtagatgatcctcttgctgaaggacatcatccgtgggaggctgaagaggaagaacctcacaccgaggccgagtttcaacatgtcctcaacgaggccggacttccagtcaggttgatctcattcgccagcttcagaactactgtcagtcagccttctcctttcccttgattgcctacctggtcgtttctttagtgctgattctttcgtgtctggctcttgacgtttcattctcttttccttagggcttgaggaggtcattggaagatggtatcaccggcaaatatgtcaccccagatagattaggcttggtgttgagagggtttggaaacttggaatcattcggcgcttccgaatagtatgtcgttctattgtcttttctagcgcatatacccatgaaactaactttgacttctttttctctttcttctgactccctctcgaagtatggactcggctctcacccttccgaatctgatctccctcctcttcaggggcgctaacccattgccgcctgtcctcgctcaagaccctgaatggaggcatctcactttgttcaggccgttggttgcgttagatctaacaggtgtcaatagtagagtcttcgagaccgctcttagaaactttgttgccacctttctgacgcaggaagtcgaagaagttgatccctcggacttggaccctgaacatgttcgtaggagctttcttatgttgttttcatttcctacccttctttgatcggatgcggagctgatctgatcgtttcctctctctctctctctctct

SEQ ID NO: 3089 - DNA, 38573 bp, Xanthophyllomyces dendrorhous
tctctctctctctctctctcacacacacaacaccatagcctgtcgaggctattcggaacgaggctaccatcccgttcctcgagcgactttccctccattcttgcaaattcatctcgtcccatgatctattgctcttccttccatctttggtcaacttgacccatctcgatctgagttacacgcggataaccagtctgaaggagattgaaggtctcaagcttaaagcgatcagtttgagtagatgtacgaagctagatggagaccaattgctacagtgagtatcatctagtgaatggcttcgtccttgatcgtcttatcttctaatcggggttttttcttcctacctaatatcagattcttgttgcacccggctcgagctgagttggaggacctgaacttgtatggttcgatgtctttcccttctccgctgagcgcgttacagctactcgaagtccttcaggaatcacctgcgttccattcaaagaaactccgatacttagacatttcgtcttccaagctgacgaccgatcacttggctgtcttccccgagcagccctcgcttgtctcccttggactctctcatatgccgacgttgcctctccgtgatatcaccgccttccttaaattgaaagcgttcaacgttgaggttctcacgttgacgaacacatcgcccgagatcactcgaccgccgaacgtagcggcctcgatggtcgctgttcacgcgcttctcatcaacccactaaccgcccctccgttctcgttctcgttgccctcgccggatgaccctcctccaccggcaccgggcaaactccgcgtgatcgagttgaccacaaatttgcttcgatcgctttctcatgcaaaaggtgctgcttggagggttatccgttcgaacggttcaagaggctggtattgtgatatatccgccggctgggtgtcagattctgttctccccccgacagctttcccggctttcccgacggagagtgaggcaccgagatttcaacgaaacatcaagcccgaacatccttggcgaaagtggttggcgatgttggcggagagtaacggcaaggttgatagcgccatcggtttccattcgagaaagatcgaagtcttgaaaggagagggcttattgggaagagaagacgggctgtatggaggatttgctttcgtgagtccttcttctctttttttttcactttaggcttattccttttctttctcactcattttggtttgtgtggctgatccattctttctctcttatattttcttgggggggaataatgtcggcgatttaatagggattcgatggctaaagaaccaaccggatacatccctcttctcttctgtactcttcattcctttcatctctgcatccacacaaacatctttgcacataatcgcacactacacaaaacagaatagacttttttcccctttgctttttgtcttaatcttcgccattcacatacatctcacatgcacaagtccttagctcaattcctagaacgcagaagagaagaatgactggttcgtttctgacaggaatcttgtggtcgatttatttaatgattatgattgttcgttggcggatctacacgaatacacatcctggacgaagattaactctctctcttttcttttctgtgatcggcttacttcttgcatctcggctgaaaggtatgggaagaagttctatcgatttttagagatgaaacgaaaagggattttttttacaaccacgcaactgtactgctacaaaggaatgaacaaacgaacgagaaaagaaagaaagaaacgagaggatttaatccttgaaccctcgctccttgacaccgccgacatccttcttttgcgacacgtccactcccaattccttcgctcgctcctctgcccaatccttagctttggcattgtacttctcctcatactgagcgactgaaaggggtcgttctccatgaggagtgaccctgacgccgtgtctcctggcagggaaaaagtcaaagagagccgagtggttgacgagcctgttatcccagaacacgactgttccctcctcccaggacgctcggacctggtggtcggcgctggagacaaaagtgtcgtagagaagacccaagatcgcgtcgctttccgatttgggaacaccgacgatccgtctggtgaaccctgggttgacaaagattgacttctggccagtcacagggtgtactctgacaataggatggatggtctcaaccggatcccgtcggacatggttaccggccgcttccgatcccttggcttgggcgactccagaatggacggcaaagagggtctcgaggtacgcttggaagcctttggagaaggacgagtacgcggcgagaccactcgagaagatggtatcccctccaacctcgggctgggcgactaatcggagggacgtcaaaccaggtggctgaagttcgtacgtaacgtccgaatgataaagctcgacctttttgaaaacggtgttgtccggtcgcgagttcttgtcggcgtacaccaagtgaatctcgtcgaggtcgccagatttgggaaccgcggtggtagcgtgcttatgaagtcttccaaagtatcgaccgaagtttagctgttggtcaaccgtcaaatccttctgacctcgaacgacaactactccaacctgagcggcgagtagagcgctgttttagaagttggttttattattaccattcaattttgaatacacaacaaatcaaagtcagatttctccgtgatctcaattagcgaaaagaggatagatagagggcagatccttacaaatcgttcttttcctcatcagtcaagctcggaagatctaaacctctgagctcgattcccaacgcaggagtcaagaacttgtgtcccgaggctttctttaagattaggttctccttctttgattttcccagactaggcgcgctcaatccaacgtcgacgtggtcaaactcttcgagaggaggccagttgaccttggggaaagatggcttgaggtggttgaactcatattccgaatcatctgttgaagaaagatgaagagttgccagtagagatagtccgttagaatgatagtatagtcaaaggtgagaaagactagagaaaagaaaagatgggaccgaccttgaccggcgagctcatctccattgtgggtagagaccaaggcgagcgacccatctgtagggtaaaaggcaaggtgatacccatttgagtgaaagaaggaaagaaaagtagacaagaacggatggaacgtacaggcagcagcctcggatgcgatctttgccttcctaggctcttcaaccgtggtacttgatttactgttgaaagggtttacgtaagacattcttaattgattgattgaaagatatggatgtaggaatgtagatgcgaatctagtcgggaatgtgtgtgtgtatggcaagagagaagagagaagacaaaacgagaaccaaagaggaggtttatgtactgggctaagccatacgttcgtgcgatttcgtgctttcaatcatgctctcatctgaatccaccggaggacagcgaagactcggagggaataaacacagatgaggtgaggtagggagattctaactcggtgtttctctactgtcggttggaggtgcgaatgctcataggcacacaaagagaaagaaaaagaagcgtgatgaatcactacaagtctcgtcatcgcctcggtcagccccttctgccggttaaatctccatccagtcagcacgatttgccgacaggtcagtttagatctagtcagttgtgatgcatagtgagcgagacggatggagtgtacacacacacacacaaaaggagaggaagagaaaagaacgaaaagtcgccatttggttgagggaagcacgaattcaggcgggatcggtggattgtctccggcttgcgtctctttctcgctcatctccgacagccttccatctatttgttgctaagtgtccatcttctataccatgatgagtaagatatccttcgtcggatcggcaagcacgaatcatgtgcaaagccttcttagtgtggtcgaggagagtataaacatatgtatactcgtcagataagcaaaacagagagagaaacaaggaaaacgccgcggatgcatgtcgttttctattgcctgtgtatatttctccctctgtataatattcttctttcttctcttttgcttgcaacgatgacacccttagaggtcttaagaatcaaaataccattcaagatatcgtagtgaagagaaccatctcctccgtctttgataacacatcgagtaccattatccgtggaggggacaataagaacacactggacgaaccgacgaacgtcgttcctaaaacgagttgttcgattattaaaccacaaaggaaagtgatgataagcatttgaaagaggcatctaagacgagaaaggaataagccaggtcaaaccttcttcgagtccgaccctgttgcagcacacaaacacaacttccttctgtaagacctcacgctcatctcgctcgctcgtctcttcgagaaagatcccaggcggtggcggcggaggatcgtgtaatggcattagtctgtgggcccaatagtttagggtcgagaacgaaggtccgtccggagaatccttctcatcttcttcttccttatcctctagctccgagcctgtaggtggaggatcagtcggtgccggtggatctagccaatctaatggagagagcggtcgagcgtgcattgttttactaaattttagtcggagtgttccaaaaccatatgacaaaacctgcatatagagatgcacgtactagcagtgaggacaagagtgtcgaccgagtctatcgagagagagcgcaaatcataaagagagttctttgtattaaaaagaaagctatcggcccgcaggatgatcccgatataatcaggctcagatcacttacgtttttgggcgtaccgagagagttcgtatgcatcccacggagagagaaaatctttcgggttgatatctgaagaggaaagagaacatgtcagtggggagacggacaaggatatgaaaaaggccatacatacccatacatatggccaaacaaagtcttcctataggttggggcagatctacaaacgagaatccatcgcctgttcgccatggttataaaaataaaaataaagattagccattatatactctttgaatgcaacccaacataaagctaccagaccgaccaaccttcctgggcccaaaatttgtcggtatcgaacaggaagctcttccgatagttatgtacgatgtcgcccgaagggctgaacactgtggccgagttccagccatttgtgcctgggacagatgaacgttcggggtatcctgcaatcacatacgccctgtttagcatgtgtaaagattcgaatccggtcgtcagccagcaagaacaagatttgggacgattcagaactaaagaagacgtacccgatccttttggcgagtgaccggcagaacagcgctgtaggcccaatccgtggttcctctaagaacggctcgatcgattctgggctagtaaacatatatccggtgaaggcctggagaaaggagagaagaggaagaaacgggtgagtcagaggatcctatgagatgacttgaccgaacagaatgtacgatgtttatctgaccatctcaggaaataccaccaggtctacttgaccaggcttcagacttgagttttgacgataatagagaccagaacgtaggtaagcgtgtgtcggcctgaaacaggttctgatgacgggagaagaaaggagcttacggatcggtcatctctgaggctttgttgaggtttccttgaacgtctctcagctttgggtcatattggacacatgcaactcttaacgggtgctctctgtacgttggagctgatgaggacgccatggcgatgtacactatgaacttctaaaagggtatatctaagtcgagtcaagtccaatctggttgaccaagctaaatgcggatattaaggaagattaagataggtgagtgtatagcctgacgcacgacacgtgtttgtggcggaacccgccggttggttcgagtactattcacctttggtcgtccatttgacacgactcaaactcaagataattcagagatcacgtacgaaccaccgagaggatgaatgatcagatgaacgtgtgtgttttcgtttttaatttctttcttcttctttggacaagaaatgaaagcataaagatatcgcatataatctctgagatctaggctagagagagatgtgatacgtttaaaagatgtattctatacatcctttctggtcagactcggacacgagcgagagagaacgacgctgtaagaaagaacgatggaagcccaggcggaacgatctttaacagtccctccaatatgtctctttatgctctatttctttgccgtctgtcgttatcctcttgtcttgtcatcgttcttgttatccttgttctttccctctcgtgctcgtcttctaccggaacctgttttctcatatcagagattcaccacgttagggttaacgctcgatatcattaagaaatggtcgatcgccgcccgaaaacatgatgagcctagattcggtgatgtcatgaatgatacctttactgcgcacatcaccctgactgcgtaccttgagaatgtttctttcctctttctctctcaaacgcgcctcgcttcagccaaacacgcgattgatgacgtacatgtgtttgagagagaacgcgacggaaagtgcacgcgcacagaggcaccagccagaagaaaagagccctcctgcgacgtcatcgggcggcgggacaaggaacaaagtcagggaccggtcgagtgggcgtgcgtctgatcgtgggcgtgagattggaagattgagtgagagagtacaaaaagttggacgttgaagtcgtctcttcttcttttccttcttcttcctttctctcatacacacatcacatacatatcccacttctctatctcttctttatatattttatagttttatactttatcttctgttttgatagcctgtagccctaacaaagaaaacacaacgcacacaaacacttgatctctaatcaccacatcctttcatcataatgaccgttccccaagccacccagcagatcaccaacaaccccagtcactacgccgtcacctcgcccaccgtcaagaaggatcaggaggctgatgtcgagcgaaagatgaagctctacggagtacgtgtttcgtctttccatctttctactgtcttcatcttcctccgttcgcgcgctcatatttctcttccctttcttccaggtcattcaagcgttccgagatggatcgttcccgtccaactcccagatcgacgctgctttgctcgccacagaaaaggctactccggtcgacatccgaaatctctcgcccagcggaaagaagctcatcaacgacgtccgagacatcattgagaccgcccgacttatgattcttacaaagaactctgacgagcttttccaaaacttcatctaccacacaaagtgagccttgtattcttctactttgtgtccattctcttcttctattcttcaaccgttgcttatcttttatctgatgctctcaggaaaactgatacgaccaaaggcgcccaggacaaatctgttctccccacctccaagggcgaggttaagaacgaggctgtcgaggccgcctcccaccttcgaacccttctcacccttgtgttaacaaactctgagatgcgaaaggtcatctctgatttgggccttgtcggtcgggatctcttcgcgtccgccgccgttcgaactgctgagaaggtccgaccggatgaggaggagttgaaccaggttgacaaggaggctccttccggacagtgggagggacctggtggcaagaaggttggtcaagaagtctctctgtcttatcctttttggctctattttgactgaccctcttcacgttctcaattcatcagtacggaaccaacgagactcctgtcctcgaggctaacattgctgggcacaaggtcacccacgaccccaaggcccccgtcgctgaaggaacagtccacaccgatcctaacggtaacaagaccaacgccggagaggccgttcagcaggccaagcaggccaagaacgaggcccaggctcagaaggaggacgccaagggccaggccggaggcttgaaggagcaggccaagcaggtcggatctcagaagttcgaggagggtaagcaggcctaccgagaggacggtgtcgagggcgtcaagcagcacggacgaaacatgaagagtgacgctgatgaccgatccaacgatgtatgtcttctttccttcctctcttcctttcggtatcagttggccttctcgcttatcgcaaccctttccactttctccaggacgatgctcaaaaggccaagggaaagtttgccgccttcaaggacaagcttagccctggagatagctcccgagataaggccaaccaacagaaggagaaggttactgacttccttgatgaggaattccctcaggagcgacgagatcaattcatctaccgaatgaagaaggtggttgtcgagtgccagaagcacaacgactacgatgagggtttgtcctgatctatgtgaataagctgcatctactttgattactctgctgacagatctctcctccacatcttaatcagccatctccttcttccttgacaaggctgagacttacaagggacacaccaagagccttaccgagactggtgccgactcaaccggagccgtcgcctctgacccttctttccagcaggcctacggagagatgaagaccttgcttgagcgattcgccgacggagagagcatggaccgaattgtcgacgccgtcaacaacctctacgttgatgcccagaacgatcgggagctcagcgcctggttccgaaagctcgactcttacgtccgaaagtgcctcctcgagcccggatacattctcgaggacgagtccacgcgggagggacagtctctccgagagactggcaaggccttcttcgaccacaaatacaaggcccacaaggacgctttcttcgatgaggtcggaaactggttctccgccatgggtaaagatcctgtcaacgttaggttcggagaggactggaagcgactggtggccgacgtcttgtttgacgaaaacggtcagctcaccttcaagcccgagctctggaacgacattcgacgggagatcctcccttcgttgatcaaccaggtcggatacattcccattccccgaattgagtacaccgataagcaggtcgacttggttattgagaacctcgtcctccagggatcgaacttgttccccaacattgttgagctctcggccaacaactacttcaagttctctccttaccgaggaattcctgacaagagctaccacaagttttccctccacttcagtcaggttcaggctgacatgcgagaggtcggcttctacttcaagaagaagactggtttccctaagctcaaggactcagggttggccgatgtcttgttgagtggtgacggtttgacggtcgatgtcgagcttgagagcgccggctctcgaacagaccacgttttcctcatcaagcacgtcaacgctactgtcgacaccctcaagttctctatccgagattccaagcatgatcttctgtacaagatcatggctcctctcgcccagggtttgatcaagaagacggtcggattggccgtcgagcaggccatcaagactggtttggagtacgtcgacgagcagctcgtcgaggttcgaaaccgaatggatgccgccaaggactctgacagcctgtcccgaaccgatgccctcaaggagatgttccagcgaaagaaggagaaggccgaggtccgaaaggagaaggccaaggagaaggctgacgagaggggttcccagtttgccattgtcacctcccgggacgcctcggtgattcccaacagcaaccctccccactcgaagggtgagaagatctttgagaaggacaagctcgcaaaggccggagagacctggcactcgcctgctttctccatcgctggagagtccgatttgagcggattgcgatcgtcgacctctggttctcacaacaccgcctcacatggaaccaccggttcccacactaccgctgctccttacggaaccactagcagcagtaccgccggcttcaccgctgctccttacggaaccgcggccactggtgcgaccaccaacctgtcttcccagcttggttcttcgaccacccacacgtaccctgtgactcaggctgctcccacccagggtggataccccatcagcggtcagcagcagaagtactaagggcttaccatcgtcctggtcttctctcttctccctcctttctttcttgtctagactgtctgctcgggctgtatcaagatatcccaacgggagagcgaactactttgttgttctcttttctatcgtagtctctcaaacatctgtttctttatatctctgtctggcttgtgttgaattgtctttatcttaatagtccttatttttcctgattgtaatgacgaaaccgttttctgtattgccttcgcttcttataactaaaagtttcttttcttgacctacattttcaattgattcatactcaagcagccaaagcaagaaacatttattgggcaagataagcgaaaaacctgatccagctagagccatcgcgagatttttatctaaatctgttctagccctagtccagcagaaaactcatattagccgagcaaacagcaaaacgtttctgtcgtttaccctctcttgccctatccttgtggtcgtcttcatgctcgttcgagcttagcttacgtacacatgtgatcactgaatttactcgattctttctcttctcagttcaagtctatgaatcgtctgttggtgtatttgttcgtgcacaggtgaatctatctgtccatctatttaccaagctagttagctggctgacttgattagatagagaagtccctggctagattgaaatggagcaggggatgataccaacccatctgtttatgcgtgtttcgcatcaagagattctttcctctttgtcctcgacgatacttctgattctttctactttgttctctatggatttcgttactgtcagacgagttcacttttgtgggtatcgaccatcttgcaggtcgtctaaaagagaattgacggttgtcacaagaaagaagcaagataacaatatagagggggtttcttttatccattaaatacaccaactagaacgttttctattccattctttctctggaaaccggggagaaaaaaaagagggaaaacgcttagtagacgtagccgaggagctttcctccgacgtgctttcgtcgagcctcctcgtggtccatgataccggcagaggtggtgaggatgatcaaaccgaaggatcgagcgggcaaaagctgaagaagaggaagcgacaaattagatgagcccaagacacacacacacacaatgaaagaagaatggagagttaagtctagaagaaccggatgaaaggaaaacataccaagttgacccaggactcgatctcatcaacctgaacgttgaatcggggagagataactccggtcttgttcaatcggccgttaagctcgatgacaatttttccagctcggtgatcatcgacaatctcgaaagcgccgatgtatcctgtaaatacgagaccagcggaagtagatgtcagtatacatggtgacgtgagaaagggcgcaagagaataagaacaagacaagagaaacaaatgaagaaaagaaccagaatggagaaagaaatgtcccaactccaagccaaatgcttgcgagactgaaactttaaaaccaaaaggtatcaagccgccaggcaagcatagacggcaaggggatgtggtgtatggtatgttttgtcgaaaccttaaagaaaggagccagtagggcagatggctagttccaaacagttatggcttcgagtatgtgtaggtgtggctgcccatataaattaggtggaaagaaagaaagagaaaagctccagcacaagaaagaaaggtctcaccgtgctgctgcataacagacaagaatcggacgacaaccttggaggagggtcggatgagcacctatggtatcacagaagatgagtgcgtcagcatagatcgtgtcttctctttggagaacttgagatatcaaacgcgttacgaacctgcctctttcctcgtcgctcggcgttgacgatgttgttcaagcagtcgttaaggacggaaattcggaccatttttgctagtctttaaaggataggggggcggagagaagagaagtttgagcgtccagatgggtgcgccttgctgatagtttttattgtagggaaggacagacgttgggtcaattttggaagcacagtccagataaatcaagtttttcacagtcgaatatagttttttcaacagttcgtttaatgggaggggtttttgattgaaggtgtttgatcacgaccaagaaaccagaacgatcgggaacgtgacaccaaaagcaaaggatcaagaatccgttgggcaaggataagagagcagaagaccgagggggttaataggggttttgatcgataaatttgtcgatggtgcgatttcgaaagataaaatttcagagaggaagagtcaaaccgaaaaaagaaaaaaaaagaaagaaacacatgttctatcagcatacaccctcttctacggacagcatgtctaacataagaggaattcagcataccgagacggccaaaaagaggctgttaaaggtaaaaagggtgagggaagactgagggagatccttggtagttcaaaggaggagaagaaagagaaaaaacttttgcccgggcaggcggccagtgcgggcgacccccgatggggcatcccaaactggggatatcgcttgggggttcatatggggtctaatgacatcctggctgaccccttgtagccatggcaaccgagctgacagttagtatctggtcgaattttcaacagcccctttggcaggctgcgcgagggatggctctgaccaggcgcctaaagctgtgctaaccaagcaaaaaaattcgaatgtggcgtcaatgccctgactgagaggaggctcgtgcggtctcgctttggccaggtcccccccgatacgacaagactcgcttcctcccgtcaaggcaaaccttcagaatcctctcaagtcattcaacatggtgcgttcagaggagcccgtatagagagctcaatagtcgtttctttccaaggccatatccattcccatgctctattcgttccctttctggtatgctcgacatcactacaactgttcatcgctatccgttgctggcaaccgtttgacaagaaaagttgtccaagcgagagaaaaaagagcaattgtcctaatggattgaaggagggagaaaagaggaagagagaatgaagaccgacggcatcacgtagggatggatattagcatgaaatcagggtgtgggtgttattatcatcaggagcaggcagctggagaggatacagaatggggagcatgcttgaatggaaaaggccttgaaaaaaaaagagtctgtcgaccttcagtctttttctgaacttagaaggctaacctatcaatccgggcgcattctcttctgttgtcttctttcgatgggttttgcaacgtttctttcaaacttgtagggacgagtccgcaccaaaaccgtcaagcgagcttcgcgagtgatgatcgagaagttctaccctcgactcactcttgatttccagttcgttcttgttctctttcataagctcgtaactaagggtttggagctgatcacgatcattcgcaaccaccttctatgaatcaacttgtcgctcttcgtacatctgtgaacgtattttcctcgccttcaaccgataaaatcttcaaaccgactacatcaaaaaacctactttgttcactttctcgaaaaaaactaaaaatccaacctacacaacttgcctcctgcagcaccaacaagcgaatcgccgacgaggttgccatcatcccctccaagcgacttcgaaacaagatcgctgggttcactacccacttgatgaagcgaatccagaagggactcgttcgaggtatctccttcaagcttcaggaggaggagcgagagaggaaggatcagtacgttcctgaggtctccgcccttgccgcccctgagctgggtttggaggttgaccccgacaccaaggttcgttaacaagattggaccgtggcattgatgtggtgtatgaactccacaaatcacttgaaatcgtttactgatgcttgtttgtgtcattatttctcttcttcgccatcttgcaggatcttctccgatcccttggcatggactccatcaacgtccaggtctccgctcctatctcttcctacgctgcccccgaggttcgtatttttgtctaccatatcgctccgttttagcttcttgacacgttctcattatatttccgtttcgtctcatcgttctccttatacagcgaggtccccgaggtgccggacgaggtggacgagtcgtccccggagctggccgaaactaagtgttttcttcaaccagggatatttgatgattcgctaggcttgatattacaaccaaaacaccagaagatcgcgaaaccagacagttcagatgacgaaacagaaatagagcagagcatctgttaggttcgattgacacagattgcacagctgatcgagacatgccagtattgtctgcaatagtaacgggaaatggcatgcagtggtaatagaccgatgaacatgggtctaaacgatttaaaacggtacagcgaatgaatggatggggaaacagagagagctatctccatcgtcatgcgacgcttgtgggacgtggacgcttgtctatacagtatagcaagagtccaggtgtctagaacgattataaagagagaaagagagagtgcacgaagggaagagagcccgaatgagaaaagttggggtgagcacgttcgctatggatgatgacgatcagagttcattagggaaaatcatccagttgaaatattgaccatctctcgttactcccgtcctttttcctttcctcttcaaatcgtctctgtttcttctcttatcttgactcacattttcttctatagatcatagagcccttcccgaacctacacccaaatctaaactagatggctctcccagcctctccagccaagcagccctctaagggtgcttcctccgactcggctctcaccggggctgcttccaacaagcccagccctgcatccgagagaaagcctggggataaacctatcgtgttgggaatctgctcaatggatatcaaagcccggtcgaaggcgatgagagagatcttgactagactagtagaaatcgaaggaccaggtctggatatcaagatctttggtgataaagtcattttggatgacggtatgtccggccgtttcttcctctttccttgtcgttcccaacgagtcgactgatttctctctgatctatgatcaaaacatttctgatgattatattccgttggttctcttctctcctgatctttttgaagacatccatcactggcctcagaccgatatccttatttcgttcttctcaaccgactttcctcttcccaaggccattgcctacacccagctttcgacccaaccccctccgatcgtgatcaatgatctaccgatgcaatccgttctttgggaccgtcggctcgtcctcgctattcttgatcacattggggttcctacacccagacgaatggaagtttccagagatggagggcccaaaccggagagagtcgtcaaagagaaagtcaagagggagctcggactcgagttcacagcttgggaagataaggagcagactaagaaggccgacgtgacaaaaggcgaagttgtcagaggaacggatgtctcgctcagagaggatggtgacgcaatcattgtgaatgggcaggtgatggagaaaccattcgtcgagaaggtgagaagcgttcattcgacggacgaacaaactaatctgtgcattatcttgaaaatgcacggttgtgtggggatcctcttggccttgatttaggtctgactgaaaactgagatatgttcctcccctgtccctctcctcttaccagcctgtcaacggagaagatcacaacgtgtacatttattacaaagggggaggaggtcgacgactcttccgaaaggtatatctcttctctcccctctctttcctaattgcgccaatgtggctatcttgactcattgtaatgtcatctgtcgcccatgttgtaggttggcaacaagtcaagtgaatccgatcccacgctcatggcacctcgaacggagggcagttacatctatgaagagttcatcaacgtcgaaaatggtcggtctagatcagcgatctatcggttttgtccgaagaaaggaatctaccgcccctcctgactttccatgctctgttttgtttcgtcttgcctttcatcagcggaggatattaagatctacactgtcggacctcatttctctcatgcagagacccggaagtcgcctgtcgtcgacggtctcgtccgtcgaaacaccgacggaaaggagattcggtttatcacaaagctatcggacgatgagaagtcatatgccagtcgaatctgtgatgcttttggacagatggtttgtggattcgatctgctccggtgcgaagatgaaggcggaaggagtttggtaatcgacgtaaatggatggagttttgttaaaggaaaccaggtgcgcgatcatcgtttctacaattaggattcattctccaaagacaagaaggatattaacgatgttggcgcgttcggggactcctcctggattaggcctattatgatcgagctgccgagattttatctcacgtttgcgaacgggctagaaagcgacgagctgcgctcgccaacttggccttggccgtccctaagtacagaggcttgattcctaacaagacgaatgagccgactggatcgtctagctcgacttcgactcttaaagctagtgtaactggtatgttttgttcctcacagttgaatcttgtcaggaaaaattctggatgtgtgcatgagaacaagtcttgcgaagcaggttctgaacgatatttgaaaactggtttttgctgggtttgtatagtgttccgacactctgacagaacacccaagatgaaatctaaattcaacttcaccgtaggtgaaccttgggccgccccgttcgtctctctcctccgaggctacagggaggagattgttctccgagaatccaagcagcttgatttgatcctcgctgctgctgccgagtcgattgagataggttgtccggaggatgtgatggagaaattggtcaagcttcaggacgttctgcagagaaagaaggagcttgtacgtctttccatcttcctgttctactgcgctgagtctttatgttattacatgattgacaccccgatttacctccttcttttgtcgctgatgcatacgaaatagcctggaaccaaagctcaactgaagcctactttccctaaggacaagtctgcccccaaggtcaaggagaaggatgaccacgacgacgacggttcaacgaccgaaaccgaagatcgaattcgtaaatggatcgctactggagagatgcgtaccaaccaatccgaaggtgatagtgaggtcgagaggttggaatccgttgaggaagaaccttccaacagcggtggttctggccctgggtcagtttcggacaaggcgacggctggaacagccgattccgcagatcaaagctcggtaggcttgacaagaactgtttcgagacagggatccaggagacacaaccctagcttccccgctcctcatggactggagaaagttcagctgggtacgtgctatatttcgtatgctacttgttctcgtcctgtttgctaatagattgtgaatctcatgtggttttattttcctctggctgcatagttgtcaagtggggtggtgaagtatgcatctaccttcgttgttcgcatgtgcgagtataggaactaaccagctcttctttgtctagtctactcatgcagctcgataccaatccaaggatctaggagaaaatatgaagaaggtcagatagctttctatgtgtaggcggactcattttcaagcaactaactcatctgcttctctatcacttcatgatgacaataggatatcaaaatcatgaacagcagtattttgaagaatgtcaaggtttgtgataatatttccgtcaccgaaatcgattcggcagtgttatcactaatgctgttggtaagcgggcgtttatactcatcttatagatatacacaagttccgaacggagagttatcaacaccgccgatatctttgctcgagctcttcttgacaaagaaaacatccctcccgagtcgagtcgattcttggagcggccgcctctggtggatcacttgattcagcgacgagatttgctcgatgattcgaatgcggccaagagcttaatggatggtatgtaattcacctcattcgatgtgaatccgactaaggattgagtggcttatttgatatgaattaaccatggggacacggtcaggtgtcaagaagaaattgaaaattcttcttcgaccaggagagagcgaccgaagacccggtctgtactggcccaaagagctcaagaaagagcctgttcaagtcgttagagtgagtcgctacctatcatgcgacagctagctctctcgacgtttcactgaatatataatccacgcataccatgtttacaggaagttgtagagatgatgaccgacttgagagccacattgttggccaatttccagaatcaagatgtggataaaattcaatctagatggtctgtcttctcattgagcttcataactaacttaggcgtcggaaatggactcattggaaattactctccttcggtcatgctctatatgtaatgtggggcctggcaggtgctcaggagatagccctagcctcttcaaggagcgatgggagaagctattcgaggactgggtggtaagtaatggggtttttctttcgtctttcgtctttcgtctttcgtctaaaattgattgttgctactggctgacaacgtaaacatctatgctgtcatatagggagtcaagcaggaaaaggttcgtacgcaggtttagagtagtagaagggtttgtatgctgatataagtctcttgtttctaaaaccaaataacagtttgatccttcaagggtaaggcatcttctttggtagatgtcatcgtctgtatcggagcccccaagctaaacaacgctcttgtcttctccaggtctccgagctttatgactctctcaaggtgcgcacaggaatgtctgtctgattggattcacagacgttaacatagaacacatcgctcttcacagtacgactctcttcacaaccgagtcttcctcttcgcaatctttgatcctcagtgcggtaaagacctcaatgcccctcaggatcgaaaactgcacgagctcgtagatcgggcgaagctcctatttgatctggttgctcctcaggaatatggtgtatgttcctactatttcagaggtctctatagttaacacggtctgaaattgacgccattacacttttgtgtacatctaactcagattgaacctgaggagaaagaagagatcggaatcttgacttccttacctttgcttaagaaagtcatccaggtgtgtgcatcacagttcttgactaccaagcgacttagtcatgcgatactaattgccttcgcttctgtgatataggatctggaacacgccaaagcgagtgacgagtcacatgcttctttctacttcactaaggagagccatatctatacattctgcaaccttgtccttgctgctggtcttcccatggacaagaagaaaaagattccagaactcgactatggtaagatgccaaagtccgcccctcgtgcatcaatattagcgctgatctaagctctactatctgtccacattacgaagcttcgcacatcacgtttgagctttacgagcgatcttatcccgaggagcagcgaaaggacttttcgctcagtatcgcaatctctgagggtgctcattcacctgcagtgttggactcttcggtcgacgcgagacactccctgaatgttcaagctcgaaagaagcttacttcgtaagtgatcatcttgctgtttccatcccagtcgtttttaagttataagtatcactaaataaccatcgtatgatccttctctgtctctttcatttaattatataaagtcacatcccttacgagcaggctatgactgctttgaagcgatacgagggcaaagccatccaccagaacttgagcttctcgaccacccctcttgaggtttgttctttacagtctactttgtgtttgaagaagatgaatactcaacttggtgactctcttgtgatctggttagggtgaggccatctactttgatagagatgtgaaggatgaactcgttctccctctttcctcttctagatatggagaggtcccgtcgagtgcttctagcgatagggctagtgatacatggtgatagacatagtatttatgagcatatagacctactctttggtggctcttgtcttccccagtttttctatctgtggcattatgtcccgtcttgtcaagaaattttctttccctcttttggtatcctgttactatgttcttctgaaatttcaatacatagatcaaatgtgtttatttccttcttattgtcctgatactcatattactgtatcgggctgtgaatgattgatagagcgcccacaacccttggacaaacaatcttgggaacgcttgtcatgtatcaacatttccgatcactttctcaagccatccctcttccaaaaggaaaccacttcgagtcgttcaagtacttctctacttctacccgatccccccatttaccttccatttcgcggacgaacgcgcagttcagatcatccgattcttcagccgttttgggtaaaggcatcagcccgttttggtctcttgttcgaccgggaccgatctcaccccgatcatgtttctctctgtagtccgtttgggtcttcaatttgatatcgagtccggcctcccagatgttattcatccctccatgggtatgaattctggcttggggggcagggacattcttgatcatccatgtctgtaagaagaaaagagtgttccgtgagtaagataagtcagtgctcaatagttcgattcaacaagtggcgagccaaggcaaagggggagagtcgggttaacaactcgaaaagaggtgtatggtaatcgactgacagaaaaagtctgcatgtcgttcgcttgactttcaagatcaagagttggcccgtttgccgtctaatcataaccaagggaagtagcacgcaagacatcaaatagatgatgaagagaaggaaggtaaatcaggacaattcattctggacagagatcgataataacagggaaaaaactgacgaagcttgctctaatcttcgctaattcagcctgcttaaatttctccatctctgctgctgccgccctgggaaaacaaaggcataaaagatgatatatatagatgagcctcctatttctcttctttcaaccagacaagtcaaattggtacatactttctttcaacggtctccttctccagaatgtgacttgttattgatgcggtcgttgcctgcaaagagatacaaacactattatcagttatgagaatggagacaacgtcaattcaccgctttgacttaagtataaaggaccaaccttctcgaccgctggttttaggagcgatgaatagaaactagcatccaatacaccgggttccttcttcgtcattccccctccacctgtcttttttcctgtcggacctcctttcgagcccgtcggcccacttggtcgtcctcctgcaggcgaagatcccgatgtcccggctacaggcgaggacactgccgagtttgatgatgaacctccgatcctttttaggttggttacgcgatctttctttgacgagcttgacgcaggttgagaggttgaggttgacgagccaagtttcttagttgccgttgttgaagaggaagaagacgcagagccttcaacctgtgttgatggatgcgcggatttcaatttcttgctcggcctgtctactgtgtctacacctttgtctgtacttgggtttgttgagttgctgggatcatccttgtcgtgggtcgtcgttttgagcggcaccgaagagatttcgccggataaagtcgaagttgcatgctcaatcttgtcttcggcggcccttttgctcttttttgttgattttctcctcgagccatagtcatcatcgtcggtaccgtcctcatgatcattatgggtgtcgtcgtggttctggttcaagctattttcatttccgtcgtcgtcgtcgtcgtcgtcgtcgtcgtcgtcgtccgaagagaagtgagtcgttcttgacctgatatgcttcttcctgttcttcaattcagctacttcatcttcttccatctgatctttctctcttctcctcttcttcttctcttcagactcctttgatagttctgatacagatgcatctggttttggcgtcgaggctttcggttgaagtttagtcggtttaatgttgaatggcgatcgtccgttttgagcagaatgaggttgatgaaggatggtgacatgcgttttcgtggctgaagatttcttctcaagtgatgcggatgagactaaaagttctttggaagagggatcttgatgaaaggggttgttaaagaggggaaatcgataacatcatcttgagccaatgaccaagagaaagggagaattcttagaacaagaaacatatctacaaacctcgtgtcgagcctctagagttttcgccgtttcttccgacatgcctcttcttctccttctcttcgaggagatttccttttttcgtcaagctttggctatgaggggactttgttggtgaagcagccgatccggcagaactcagaggagaagaactgcccgtgtatgcatgtttcgcttgaggtgtatatcgagaccttgatgaatgagctgctgattcaggttcagtcgaaggctttcagaacaatcgaatcatgacgtatttcatagtgtcagctacacgtttcgatacaataatcactgatggacacatatgattgagaaagaagagaaagagactgggccgagtcgaagtcttgggaataagaagggagaagaatagaaaaaggccctcaccaaatccgttagctccatccataaggatccgtcctcttctgttcctgactgaattcttaatggtgtatccttgactctttctcctctggagtccacctcgaaccattcggattgtccgctctgagtgttccgaacggagatagcatcgacactgggatggtttctaaacgacaaggtggttactttgatctgactcggcctagggtgttttccagtagtggtggccgagaaggacgacgatgatgcttgtcgtttaggtgatgaatcagcttttgaacgttccggacgagatctaacactggcagtacgagccgaagaacgagagccggccaggtgagagctcattctgtgtgtgttgagtatgttatgttttgacgatgttgtagaatgaatgtgaggaagaacggtagaaaggaatttgtcttacgtaagggtggcctcttcggacatctccgcggtaacggcatcgaacgttgttagaaggaagagcagacagaaaagatgagaagaagatcacatacaccgcccataaccacacacagaagtagaactgcagaaagagcattgattggtgtgtatctaaaacagagacgccatatagttgaaatacattctagatacaatttttatagttgaatacaatccgagagacgagaggagattgtgaaggaaccgtcttgagaacacggaaaagaaagaagaacgccggttaagaagaagaaatcaacacacaggggtgagaagcgagagacttgggaagagaaaatgagagaaaagcagggaataggagagaagaacccctaaaacagaaatgggagaataaaaaagatgcacgtgaagaccttccctccttctaaacggatttttttctatcctctaagcgttctggaaaaatggacggaagattgcatccggctctttgaacgcattgtgaacgacgttcacaaggtagtaggtgtccatgatctcaccaagcaatgactttgtcggcgaatcatcatcgtacagacctgcccattgtttgccgatcgagaaggcctcgtccttccacgcgatgaacgagattctgtatgtgttaaaaaaccgtcaagtaagtgaatttacaaacgagaatgcttgtagggtacaaaagatacacatacgcttcaacgatactaagtaattaaaatggtggtagaagaggtcaagttaattattagcccagtgttcaacattggtaccgtgttcagttgaccaaaaactcacgtaggctgaatgatctcttttccagggaacacaccccaggtgacggcgtttggtccctcactgtgggtgttggttcgaagatcaccctggtggtttacctgtttagttaggcaaaagcaagatccaacgaaggatatgaggacaagcgcgcgatacacgggtggatatcctgatacgtacagcgtagtaggtgatatgagggtctcgctcgattcgatgaacaagagcatcaagctgagatggcgagacaaagaactcgaggtaggccttttggtagacgtatccatttgtgggaccccatccgtgagtcttatcgtccgacttggcaccgtccacactatcatgtcaagagcaagaagggcttgaattcagcaaacaaaaacaaacacaatgatgtacagtcactgagacggatagagatactcacgcaggctgactgttaatagtgaggaagccaagctcattcatctttgccaactgtcggttgataatcgacgtctctttggacgcagctgaatctgaccacggaagcgatggctaaagaagagacagcaccatggctgtgagctattgctgatctggctgaataaagatagcatcaatggagtatacttaccaactcgttcatgcaaaacttagcaaacaactcgcaaacatcctgtaccgtctgcggctgaccccatagcttgatagcctcctcccgactaagtttgaactgaggcaacagatatctatggagcagaaacataagtggacggatacccagtttaatacaatgcgaggcgcgaatgttttcaaagaaaagggataatcaaagttccgaaaatacactaacccgtcaaactctccgtaggcaggcgatcgagaatctccccatcggccgttagggaactcgtcccagttctcggctttgaaaagaataggccgaacagcatgtcagtctatgcgtataaaggcaagaaacgcaaccaagaatacgtttgaaggaacgccgacaaaatacctacttcgagaaaggtaagatttttgcctgttggcccagaactaaaagcaggaaaatgacaaatggcgacaatttgagcatctgaatgcatatgagggagctcccttgaacatcaggagtgtaaagagggaacgaacaatcggtcgaatagtttcttgtcgtcgggcaggcgtaagcgactgaaagggccgtgggtaacggcaaatgagaaagtcatgcgttgagtaaatactgagagataaaagggataatataaaaaggcattaccggcgtccaaggcaaagggtttgtgtttgccactctagcaacaaggccaatctcctccaacagcattctcgctccgaccgcgaggttgagggtgtaaatgtggagacctttgattccaacatcggcgtcgaggatatcccggcacatctgagcaacgagcttagtgccgacggctcggactgccgagtcatcgtccttgacaggctcgagggcttcggtaaagtgggcgggcacagaaatattttctcggtagacccactttttgaatgttgcatacgactgaatcggcatgatacctaaggataccgaccaacatatcagtttgatttcaaaagaagcagaagcgggtgcgcacgtgcacgttaagcgaatgaaagaaggaaaaagacatggacacccaccaggcacaatgggcacggtgattccggcctttctgactctgcgcacccaggcgataaacatctcgacgtcgtagaacatctgggtgaagataaagtccgctccagcatcgaccttttctttgagccactcgatctcctgctccttctcctcttcgcttggtccagtctctgggtgagatcctgggaaggcagcaaccgagatacagaacgcatcaccatgttcctgtcggatgtatcgaacaagctcggcagcagtcttgaatccggtaggtacaggttcccaaacctgagatccggcaggagggtctcctctgagcgcaaggatgttttgacagccgaacgccttggcggtctgtttcacgtttggatcgagaacggcgttagccgactatatatgaagagcaatgatgagaacagctgtgcagccttacgttcaaagcttcatcaagcttttctttctcgactgtatgcgtaagataagaaggaaagagagtgaagaagaaagaaaaaactgtcagtcttgggagctcctgatcgagacagtcgggtaaggctagccgaaacgaaccacaagtgatgtgcatgacagtttccattccaatatgactctggcagacctggacgagagacgtcgtcagatctgagcttcttcctccagcgttcctgttgttaagagagtaagggaagaagagagagaagaacaaatgacttttcaatccccgacagttgaccgaagtgaacgtatatgagtgaaactagaccgaccatgtgatatcgaggaattctgggccgagacctttcatgcgctctatccgatcatacaagttctgaagtccctgggctgtccgaggaggaaagaactcgaatgaccacctgttttaaagaagaaaccgaggaaagaggacaagacagaaagaaaaaaagaacaaagaggagaaaacgccgattcgcgtatgaacatctagaaacgatggttcgaactcgacgtggttttggacgcaagcacgagcactcaccatgtcctgttttccttctctgcctgagcgatcttttcggtgacctttgtcattggacgtatagatatatatgtatgtgtgtatgcgagcgggtgttgagtatacaaagaagagcaaacaacggccgaagagatgagtagggaaaaaaagagttaactctcgatcggatcaattccaaattcctccacagctcaaggcgataaggtggtgccatccgagtgagcagagggcatgtggccgcgcgggtatatgtgtacgtaatcaacactgccacaacgtgcacgtgtctgttcgcgtcacgtgtgttggcacgtgacgcttgcaccgcaatcacacttactcgtccccacgtaaccgccacgtaatcgtccgctcttgcttcgcccgccgctttctatcaactcaccttctctatcgacgacaacaccgacaacttgaacaatgcctgtagaaacagagtgtcagttggatatcgtatagtatcaatgcatattcctgccggctactgattatttttgtcaagctccaataaaacagactacgatatcctcgaggtcactcctgaaggtaagcaagatgctcacctctcctaacgcgcgcatttgtttaatctaaattccttccttgcttcattcatttcccgctcttgtccagcgaccgacaccgagctcaagaaagcgtatcgaaagcttgctatcaaggtaggcatcatggatattccctcgaaaaaagctggcttgcttctttctcacctgactcttcgatcaacaatcctcttcccgctagtttcatcctggtatgtttgctcaaaagtatgtcttgggcacagcccgtcggatcgcctaacaccactctgcattcatctcctcgcccttgttcgttcagacaagaactcatcttctgatgccgagacaaagttcaaggaggtcggagaagcctatcagatcctgtctgacccagatcttcgagcaaattatgacaagtacggaaagaagcaactggtgcgttttctctttccttctcatttatctcaatcctgtatatcataattttgataacactatttctcattcttcctctcattttatcaacagggacaaccggacggaggcatgcaggacccatctgagctctttggatctcttttcggaggcgaacgttttatggacctcatcggagagattagcttgatcaaggacttcatgggtcaggccgaagtcatgatgtatgtctagcgtttttttcttatttattatccaacagatggcctcaattaattcgactgaacaatacccttgctccaggtcttcagaagaacgggctcaaatggaagccgagatgtctgggggagcagctcccaagcctgccgcctcgacttctgcggcagataccgctacttcggcggataccacgaccacccatccgtcaaccgagacgactgaaccaacccctaccttcgtgcccacatcgaatccggctgcgccaagcaacaatattccatctcctgccacccagtctcttcaacatcacctttcctccagctctggctctccagctgctccgtcttcgacgtctgcggctgctacaggaaccagcacgcctcccacgggcgattctttcaagaagagcaagaagcccacggtcactcccgagcagcagaagaagctggcagagatggaagaggcaaaggaaaaggccagggtcgagcgagtcgagctattgcaaaagaagttgatcgaccgaattagaccgttcgttaatgctaagaagccgggcgataaagacgatgaagaaacccgaaagtttatagaatccatgagaacagaggccgaagatctcaagttagagagctttggagttgaggtcggtcttcctttttccatattgtctcctcgactacaagggttacacgaccttttggaacagaactctgatagctatttttcctttccattgtatcaaaatggaatgagaacagctccttcatacgataggtaatatctatactaccaaagcaaccactttccttaagtccaaacgattcttcggtggcggattcttttctcggataaaagagaagggcagtctcgtcaaagagggttggggtgtgttgggtagcgcgatggacgtacaggccgcaatggaggagatggagaagcaacaggagaaccagactttgggtgaggaagagctagaggcgcttgcaaaggatgtcacttccaaggtatcgtcttgctttctcttcacatctgtctgcccagcgttctcatcgttgaaatgtgagatttatcggtttgcatcatttttttttcttgccttttccttcccatgaagatcttgttgactacatggcgaggaacgaagttcgaagttattcaggtcctttccgaagtgctcgacggtgtgctcaccaagaaatctggtgtttctgatgagaccctcattattcgggccaaagcaatcatcaccgtcggcgctgtattcaaagccacggaacctgacgagtcggatgaagaacgtcgagagctcgagaggtcagccttctttttctcttctgttcttctcttgttctttcccatcactatgctaatctctagaattccaatcaacttcttgtactctctcttgccttccttaggctagtcgcccaagcagcattgccttccaagaagaggaaagaagctgaaaagaaggaagcccgtctacacgccgagaaggcttgcccttctaaatcgactggtcctgctacctccacctatacaccatcaacatcttccacctccggctttgcctcttctacctacactgcaacggtaacgtcaacggcagaaggatcatcgaccaccacactagacgctcaagttgagcgagagaaggagaagataaaggaagagcgaagacggactggtggtttcggtttctgggggaaaaagtctgcttctcattcagaatcaggagacaaagaggccaagctctaatgttgaaggagaagagcactgctgcttccttctattttcttattctgtatgtctgtggatcatttctttaagaacattttcaagtccgtatataattcttatggctttcattcttaagtcaccaagaggggcaagtgccatgagagtaagactgtagaagaataacgtatgagatacattgagaatgaaagagttatgatgtattaagagggaggtataaccttttttctctttgctttgtcttcttattgatagaatccttatctatcgttaccaacaaagagaacgagaaggaagacatgctcgataaaatgcaagagttcaagaaattatatgaggtgtgtgtaaatggatgatggatggaagaaagtgaaggaaggaagaacaagaagaagaagaagagaaaagagatggggtatcgaaacgaggaagaagaaagggaagcaccagcaatagtgataatgacaacaattaaaaaagagaattggaaacggagccaaaaagaagggaagatgaaccaatcatcttttatattattaaaacaagccatcactcccgaaagcagccttcaagccaaaaggcaggtttgcagaaaaaggactcgattgaacagccgaacaagcgaattggtgtttcgtcctatacaactcgagtacgcccacataatggcaataaatggcgaggacaatgaaccaatgccagatgttgtgactcgcgcctacgaagtcaaatcgctttcaaaagtaaaagagaaattcatcaacagttggttagtattctccaccatccgacccagagaaaagagagggaagaaactcacccctggccatcgaacttccggataatgattcgcatagaaccataggcccgctagataactgccaatcatcggtgtcaatggtttgatgaatttgcctgtttgggcaagtccatggatgagagacatatgtgctatgggtcctaaagcagagagcgccatggcgaggaagaaagcaatgcggtagccctgatgccccgttgagttcaaatagaaagagagagaaatgaatataagtcaaccaaacagcaaggttgattgtggctacagaagacgcaccttgttcttgcgctcattgaaccattgcataaacggtaatgtagatccagcaatctatgacaaagattcaaagcttgtgagaaaagagatccaagacatggtgaaaaaggaagaagactgctcactccaactccgaaagttacaagtccatagaaaaccatcggtccaggctgacaatagaagccaaagtagacctagaagcgtactttgatcaatatcctttgctcacccaaggagtcggatccgacatgcatgtaataactgaggtactgacgactgtattgacgcttgcagcgatgagccaggctattccgaagtaatcctatcgggttcatcaataccagaaggaatagtttgtaatttcaatctccattcctaagaggttttcatgcataagcaggtaaatacgcacgacacaggcaaaggtaatgaagtatcgtttggttgcacaacctgcgaataagtgccaaattgacgaacagaataagcactgacaaggatgaagagaaatttgtcaattgatatggtagcaccaatagcaaagtaagctctctcaaatcagaggtatgatagatagcgatacgtactttgaaagcggccaggaggaagaagcagagaacggcggtgtccataaaagaggaggatgaggcggactcgatcgccgtgaacggcgaggagacaaagatcacgtagggaatgcagagcagaacaagtaaagaagtggtcaagtgcgaatgaatgttaactagttaattcataaaagagaaaaggggatcagcgcatgcctgaaaaaataaagaggtccacaggaaagggtggctacgtaccagtctcgttatgacatgtaaacaaactcttgaaaagcttcggccattggtctataggaatgaaccgatatcctgtgagaacaaattcgttattctgccagaggataggaaggtcatcgaatccaatgagcccattatgggcctcagccgcccgctggacggccatttctacggtgacttcgataacttccacttttgtgaggatcacctcgtcctcaaaatcgaggtccatatcgtcttcgccgtcatctcttcctttctccgacatggccctttcgctctctgctctcgaaactgactctgtggtccctcgcctagtaagttttcccttggatacaattgcttcaagctctcggtacctgttggacgttcggttagggaatgccgggaagacaagcccggattcatcatcttggtcggtctgggagatatggttgtcgtcgggaaggatagagtcgagcaaagtaagcacttgttgagcgcctatacctaatggggacgttggagaaaaagagagatccggtagccgagaagagaaagagctggaagagggcaacattgggacagatgcgtgaagatagtctagtctggaaggtaagcttgaaagaaaacttgtcagaggctgacggacgtggttggcagtggttgaagacggttgttgcagcggagtcaggtcgcgcaactggagaggagagtaatgctggaggctagggagaagtcggagagcttcttcccgaagaaactttacgtggtgtagtaggacctctgggctaatcatcgaagaagctgatcctgttcgactatgggtcttgaagaagcttggctcgtcttctgggtgatgagcatcgacatcacccataatggtgacataagtgacaagcctgcgctccagttcaccgatgtgggagagtagacttgatcggagagacgagtaggtcaggtgagacggaacggtcggcaggtcgaggtcgagagcctgaatgttaggcaaatggtatcctgtggacaaagttggaaagtatgaaaacaggccggactgaattcaaaagaagtgaaagcaacgataggttagcttaacgacggtcagttctcgttcggttgatccgggttatccccagcatttctatgggtgataaaaagggactggacaagaactcacggctgtatccgaccaagccgccgactctgactgtcctctccttcggcttttcggtctgactggttcctgaaaagtgcttgacggaagattggaggcttcgggaagagttagaggagaaggagacacgcgagaagaggttgcaaaaggagtagaggtagaaaaagaggatgcgaatggatcggactctgattctctctctgtctctaccggtgatttatcttgtgaagataatggtgatggcgatgatgatactgatacagacatgtctgtggaagagtttgaagataccgatgagctcatagaggaggaggaagagctgctagcagataccccaaacagtctagaggttggaggtcgcactgggttttaggttgaagttgatggttgttagttgatggttgttggctcatcattcgtccaaccagagttttcgtttcgtttcgtcatcgaccatcaacaacacccatccgacaacatcataaactcatggagtattcttcactattaaggtccatctggcgagatgttagatcagaggactcccctgcgcttgctctctcattgtcgttcgccatcatcgtggccctctttcgttttcgaaatactcccaacatcgtgctcgccttgagcttactctctcgttcgtactgtctgattactgagtatgttttgtgccaagggtgacgcttacctctgccttctacttcacagtgaccgaagcccttctatgctccaatccttcgttcatagaccttaccgacttcccaactgtcgttccctatctccttccgaaggcacacagagtagcctggcttctcctcttcgtcgccgcgcccgcactggttcagtcggtccttggcctggtaagcgtcgccttttgcctctctgtttcatcccatctcttctctcttcgtttctcttcccaaccgatcgaggcgctcagtcatagatggagcagtattttcatcatgcttgaaactgacaagtgttatttcttattgatcaccgaaattacgactcgaactataaaggcacttctcatccgctcaacttggcgttcgttcggtagtctagctcaggtgagggttcgagccgaacagattcgatcaaataaatcatcctcctcatccacaagatcgacagaccaagatcatgtatcgagaagggagaagaagatgaaggtgaaagagctatgataagtattgaatcaattttcatcaaatatcatgaacaaatctgtccagtcgagatcaccgaccaatacgacttttgaggggttttcttcgtgatttctggaagagaaatacgagccagctctacaaatagtgtagagagaaaagacctaagcaaaacaatgtttccttcgggtagaaaagagagtccatccaaaagaaaaaaagaagaagaaaaaaaaacaaggagagagaaaggagaagcagatgatatgactacaacggagatgtttaaaaagttcaaagatatagaaagaaagaaatcagacactcccgctcgatcactatgcgtgccatccagcgcctgttcgagagggcatcattcccatcatgaaaccactctgtgttccaaaaccttgcccctgcgcttgaccttgcatctgcatctgcatctgcccctgacccatcgttgatgttgactgtccggataacccattgacaaactgaccttgactctggctctgggtttgattcagacctggactctggctcatcatactcgatccattcattccgtttgagagagagtatgagctagtcgatgaagggcctggctgttgctgttgaaaagagaacccggttgatgagttgaacaatccatatgccgactgttgctgtccttgtatttgtgactgttgctgctgttgaagttgaatattcgggtactggccactttccatcccggttggaaacgaaccttggcttccatacgagccaccagttgacaaggagtcatagacagaggatgatgaaggtgtgggctgagactgagcgtactgattcgagaaaaactcagtagggccgttgccagtcgatcggaggtcaaaccaccccccataagattggtaagaagactgaggaggtacagcttgaggctgagactggaacgaaagctgttgttgctgctgcagttggggattctgaggagatggaaatgactgtagacctgggttctgactcccttgttgaggagctgtatactgaaaggatggttgggtgacatattggagaggtggctgtatctggtatgaagactgttgctgctgctgaaaagccgaaggaacagcatactgcagaggctggctagtcaatgaagatgtcgttccttgagttggtgctactctaccacgtctcataggttctaccccacctggatggccaacaccttgtccgtttgctggccggtgttctagcatgcttccaaataccggggcctttgctgagtctttagtcgtcatagagctcgacggcgcttgtgaaggtgttcgaacaggaagtggaggcggtgacagttcatccgcgtcgttttgatgagcgcggctcgatggatgagccgcatagagggatgatgaggaagccacagggacaggagacgattgggccggattatggcgaaaggctgcctgaacgatcgatgactttgatagtgaggtatcgtactttcggcggatatatcttgtgatgtgtatggtagataaagcatgttagcttgcatcatgagcatcactatcggtacacggaattacgtacctctcaagctcgttatccctctctccatgttcgagattggtagggggaggatttcgagaatcatcgttattgatcttcaagtttgacttgatgttgccgatatctcttattgtatcaacttgttctctggtgaacgtgctattcgagggacagggcgattgatgggatgcgttagccacaaaacaaacactctctctcttttttgaaaggcagagatgattgcttactccaatgttaaacttttgactctactgatgtgcgtctgtaagtccacggacaggagaacgatagaagcatattaggacgagcgagcgagcacatttcatctagccagcctcaaaccgtctcagaggaaaagagagtatggtataaacacgactagacttacgcccatctttcggtgcacgctcgcacagctcacacaaagaaagattcctaagttccaagagcaccatctcggagctggagatctacagtctgcacatatgtcgttctgagcatgcgagtaggcagatgagtgtattggtcagaatacatgtggattcaagatgataattattgggcatagtgagatagagggaaacgacggatgtcaagacaaaactcacgccaggcagcttggatagctcgaccaggagtcgttcgtttcttgtttttgaggccgacattgatgagatgagaagacaattggatgccagtggtgctgatgaagatgttgctagctgttgtcgctaccttgttcttcttcctcttcttgctgctgctgctactgccgccttagtgggggaaggactaggttaatgcactgtggctgtgccaatcacgtgaccgtgcgcctaacaccttccctgtgttctccttccgcttaccttccatccttccccccgacacaccagcagcaacagcagcctcgcactttctctctctctctccccctcatacacccagacaagccatgcttctatcagtctctgcagctctgtccatccttccggcgataggtaagagtcttttcggcagcttgatcgtcacgcctcttgcggttttacttaccggtttctgatcacacacaaaccctacacttctttgcaccgtccttctttctttctttctctggatctgtccggttatatgttggatataaaacacgacatgatgcagctctcgccttgccatcgtcatcgtacaactatccggacgaaagagcacttgctagtcgtggccttgttaagcgacagacatccattcctgaggtctgcacctatatttgccaggatattgaggtttgtgtcgccttctccccccctttctctttctctctttccttctccttctctttctcccaacctcacagaacagaacagaacagaacaggagcacatcacttccaagctcctttttgactgacccatgagctactgttcattctctctcgtctttcccttgtcttctttcctctcccttttgtaccgccccggatcggacactggacacagtatgctctttcggttcgtttcccatacttccttttgcttccctctcagtactccatcagtactctcctagctcttcccagctatgctgacctgtcttgtcccttctgtcaactacagtcgtgtggagataactcgacctgcctgtgcaacactcgcgttctgaattcctgtttgtccttcctgctcttcctactttgtgtttcaactctcacactctgctctgaaacacctacctgatgctcttggttctttcagttctcaattgctcagagtgcaccttgctcaacactcagcaatctaatatcaacgtctccattctatcataccagtactcgatagatggtctgtcctgctttcctccttttctctatcttctccttgctctttctccacttactcaccaagagcatctctacacagcctaccgccaatcttgcagtatgaccactcctacacccatcatacttcctaatgtcaccgtcacccggccggctgccaatttgacgttccctactagcgctccttccaaccagactggcaactcgacctcgcactcctcctccgtctcctcttcgcattcctcgtctgtttcctcctcatcttcttcatcagccctgccgtcctcttcgtccatgtcttcgacaagctcttcctcagcctcgatatcacctacagtgtcatccgcagcagcttcgtcaagcacgtcggccatatctggagcaaacatacttcaaaccggatgggtcaccggcgtcgtcatcggtctagctggcttagccctgagcgcaagtctgtaattgcttcttctttttttttcctttcctctttctctctttctcacacacctgcaagtcattggacagtttccgttagaatcttcctccttcttgttctttcctgcttgatttcttattttatttttccccatctcttctctatattatat

SEQ ID NO: 3090 - DNA, 4615 bp, Xanthophyllomyces dendrorhous
ctcggctacagcattccgggctcggcgatcattgtgcgatacgtaaaaaactcccatcagaacgatccgtggaggacgctgctcgaactttgtctatttgcctttgcggtcaggaccgtcctgagttcacgcacccgaacggatcgaagtccaaagaactttgtcgagctcaccgataaggttggccatatcctttttcttcactgaagaatctgtggggtgtattgcgcaaacagctgattctcttctgaacggcaacaatcttaggaaatcgatgaactcgtcgtcgactggactccagaacctttggtggttgagcagcctccgacgtcaccagatgctaatctgctcggtactctgcccgttattctcggcagtgtaggacccagagtcaagctcgcatcaaacccgaacaagagtgtgatcaacatgacgagctacaactttactggcatggcagaaaacgaaaagatgaaggaaaccgcgctgacgacgcttcgcgactatggtgtcggtagttgcggtccccccggtttctggggtaccaacggttcgttctgctttcatcttttcctcctgtctttgggatacaagtgcgttcctagaaaaaggcaaatatgaaccaattactcatcaacctccccttttctcgttttagatgttcataccgctctcgaacaggatctggccgccttccttcaacttccatcggcaattatctacgctcaggctttcacatgcatcacatcggttatcccttcattcgctaaacgaggagacatcatcgtggccgatcgagcttgtaactttgctatccagcgaggacttcaaatctcgagaagcaccatccgattctacgaacacggagatatgagctcacttgaacaggttcttgagagtgtcaccagggaagccgcgaggaaaaagtctaagctgactagacggttcatcgtcacagagggtttgttcgaaaacgatggatttatcagtgatctggagaaattggtgtgtgaagctttcagttatgaacagcacttatatttccttactcatgataacatttctgtccaaatcaggtcgagctcaagaacaagtacaagtttagactgattttggacgagtcgtactcttttggaaccttgggtgacaccggacgtggcttgactgaactttgcggagtccctgtaaggatgattcgctctttttccgcttctctttttgcatttgctgacagaagttctactttcttgattaatctgctttggaaacactcgtactataaaaaggccaaggaggtagacatgctgatcggttcaatggcaaacactttaggagccggtggtggtttttgtgcaggatctaccgtggttaccgggcatcaggtgagacttttcattcattgaatcgatttttttttctttacattaatcgctgttcctccatcctttagcgtatcaattcggctgccttcgtcttctcggcctcgttacctccgatgatcgctacgaccgcttcgaccgcgatccggattcttcaatcaagtcctcaactatttgttacccttcgtcaacacggcaaacttcttcgccttacactcgacaaactagaaggaatccatatcccttctcatgcgctctctccacttgttcatgtccagctgtcaggaccggctccagttgatatggcaggtattgaacgtgaggagattatccttcaggagattgtcgaagaagctcttaatgctagcggaatcttgttgacgaggacgagaagattaagaggtcaggaaactttcgaggcgagaccgagcatcaagatagcattgagtagctcgttgacaaagaaggatatggacaaagccgtgggtggaatcaaggcagccatcgtaaaggttttgggtaagaagcgatgatccttttttccctcctttcccgaatatttcttttctttctttttacgatcttctcttcgatccaacgcatcttgtcagataaagtcttctctctattgtctacttcagatcctccattattcgaaacatacttaatatccttttaatcagcttcatttcacaatctgttgtttctcctcttctaccttcgagcatcttatctcctctttgctcctttttttcttttccttttcaaaacttgaattggtttatgtcaacatcgatattgacgtggtgtgatgggttatttacacctcatacctaggtcagattttgaaagtcggttagttgacagcaagaaaagtaaggagcatatcgaatatatatgtctacagaacagatgaaagcgctactactaagtatcaattgaaaaaggtagaaagggcgagaaagagagggtagaagggtagaagcaaatctatgcaagtctatgagaggatttaatggtttttgagaagtgtacggatgattaataggagtcgtaagatgctgtgctggatatatgacgaccgaaaagctgttagaccaagaaagaaagaaagaaagaaagaaagaaagaaagaaagataggaggaagagatggaatgtaggatgaggtaaaagattgtcaggttcaaatatcgattttgtcaagattaacacttctgccactgttgattatcagagatttaacatatcaaatgattagctctcgcagactcctagctagatgaggaagtaaagaataaagaaagaagggataagggatgaaatggtcaaagagacgtaccatcttgaggttcttcacggccaagcctcgttccttgggatcagaaggccaggttgggtaccaagtactcgtagcgttgtagaactatagacccaattccaatgtatttggtcagatctttgcatacatcagaggagaagaatgcgaaaaacagggaaaactccttacgtcataaggagctgtgagagaggtatcaatccaaggtttgtctccttcactatcagggaaccagccactcgttccaccaacagccacctcgattactaagtagaaagctatgtagaaggtagatagggtgatgaaaaaaggcgaccatcagctcatagtagggaagacaagaacaagttatgaaaccccaacgtacctcgatcgaaaggagcagagttgttgttactcttcgcccaagggttcgtcaccgttacatctgtcgaatcgttcttgaccacactggggtactgagctctatcccagaagctctcactggatagatcgtaatggattgtctgctggacccgagaatcgacgtctgcataaagcgacgcgagcgcggatagagataagatagaaaagcagagcaatgagtggctgaaggaaggatgtagaagagggtccatcgaaagtatggaggaggaactgacaagtcatgatatacttgtcggtccattccaatccgaaagttcggaatcccttgttatagtactttcgtcgttgttgctttgtgtttagaataagaaagaagtagaaggcgtaaagagtcagcgtcatcagatagtgaagataaatgcaagtattataggcaataagaggaacccacgttccaaccccaagtccagtaagttcggtcgagtgcggtccaaactccccagtgcaaagcagagctgatgtagtcgactcctcgggttgggtagctggctccatttcctctaccctgaacgatctatagtgtttgggcgttgagacaaaagttagtcgagaaaggctttctatcggcggagagaaggcctgcgacagcttgaaggaagattaaaaaacgtacatcgatctctccactagcaggccatgagccgtaatagtcctcgacgggagacatccagatactaggccaaatccagtcactgcacagggtaaaacttatcaacccaatagctccgaaagaagaatcacttcgaagcgatgtatagaaagacttacccagtgggcatctttgcttcgaactcgatctttccgtaccggatgtttttactcaactctgtagtaatccttgcgctgcgaacaggagggatgatggttcctgcggtcgagttactagtgatcagacagttcggaccagtcaaattggcagccgtgcaagcgccggtggaacctagatcgagagtgtatccgttctgaatctgggcgtcggagaggacgtcgctagtcaaagtggggacaatgtagagcacgttgtcctcaacaaatgagttttcggtagcgttggtatcccactcaaactcgccatttctgaagagaacaaaagagaggatagaacatagtagccaatactgtcagcataaacagagaagagaaaatcagagtattggacaagaccggagcgcacctgaaaccgccgactcgaaggtcatggtgccatatactggtatccaatgtgtcgaactgatcttctagcacaaggcaaattttccccatctgaggaacaactctgtaaccgtcccagcagactgattgaggaagaaattgtatgtagcagtcatccgggagatgatgaagatcaacggtcagatttgtaagaatcaaacgaaggcgctgactcatgaggaaaccccccggatgaacgatgaaaagactgacggataccaccgagacctaaaccgagagcgatgcaaccaaaaatgatg

SEQ ID NO: 3091 - DNA, 3006 bp, Xanthophyllomyces dendrorhous
gtctgggttctctacccaaggcttgtagacatctcctttaagtctggtagatttgaagaccgctcgctgattttgagtttgagtttggccagatcttccagtctgtccggacttggccgagtgcgtgtatgccttgctggctctagacgtagctgtcttggtaagacctgaaccagcggacattccagaaatgtaggactctgcgaatgagggtgcgcggccagcgagagcaacgcctggctgaacggcttgatttgaatctggtgtgtctggctgggaagacgagctctcggtgccagctaaggggtcgattccctcagagtcgatagaggtactgtcctctgtcgttccaggtgataatttcttttcagatccgaaaggatcagtattgaatgaaacgggaccagacatggtcgtggattagttggaatgagttggatatgaaagaaaggagagaaggacgaggagagaaagagggaaaagaaagttggtataggacgctagtttagaaagggcgtgaacgagcctggaataggatccaaacgaggaggggtagagatgaagaaggaaagcgcgctgacccagcagctgacggttgatatagtgtagagtgaatccgagagactgagacttttcggaaggaaagggaaggaaaagaagaagaaggaaagaaaaggaccgttgagaaaggagaaaccaaaacgtcgaaacctccaaaatgtttcgaatgattatcatgttgctctattttaaagaagccgagaccggcggtcacaacacgtgtcgcgcagtgaacttaaccatcttggacgtatgagcagaggaatcaacaaattgatgatcggtcgttatgacgatcaatccaaggaaacacaagagatgcgcagtcggtcgttgttggacgaacaagacaagcgaggaactgttttcctttagtcaagtcaacatagatcatagaacatagaacatacacagagcaatacagagaatactcagagaacacacgcaaacacatacacagcgtatactctaacacacaagccccatttgtccccacacgagagcctttgagcactgtgggattaagccacgagaactttaataagaagaaaacgatcgtcaaggctttgcctctttcttttacgttgtttccaatctaacaaatcgttttctttcaaactgtttctgatagcatggtttaaagcagaagaaaaaggctgtgtttgacgcaagaacagatgaattaggcaagcaaagcaagcattctatctaatctatcttttaacacttgacaatgccgagaaactaccttgattagtcaaacctcacttctcagaccctgcgacaactgattcaccatctgagctgaacctgacatcgagctaagtagatagacaagagatcagttatttggtcaatttctcaactgtcgaataacataaaccgcctacatacctctggattggacgagcgaccaatgaacttggtatgatctatagaatttatccttgcacatcaacttttgttgcattcaagggatgcgagaaggcaggagagaggagagaaggagaacagcactcacgtccaaaagcaacgactcgatttgacgagtctctaagttcaaccttcgtaaaccctagtgaacgacctttcgatagaacagtgctcaaaatcttgatcgtgtctccttccttccctgccgcacgcacaaaggttgcgccgatgtctgtcgagactccactcgagtgaagacctgtactagagagtgcaagagagcccattgtgtctgttgatgttacccataaaccaaacgattaattcatgtcttatatacaactatccatgggaagaagaatgtatcctatcaatggggagtaaaaatgtgatcttacctgttatcgagcaaatcgctcctccatgaagagtttttcctctgttaactaggaccgcgggtcaaatcagattgagatgttcttcaaactgtctgccttgtcgttgcctgttcttcaaactactcagacttactgccttcaggccgaatcgtcaacgatgcctcaacagaccctgggatagccgagattatcttgagctatttgttcgtattcacattacaaatagccaatggtcagtattaacaacttggatgttgctcaaacgttcaggaaaagagaagacatctctttctaccaacgtttgggagaacatgtaggtcgtgactttacaagccaattatcagtccaacaaaaagggcctgtcagccaccggctacaagtcaggcgaagaaggtatcgattcttaccctttctgagcaagatggtctagaaagacctaagacccaagataaggagagatattaaacgattgcagattcagttctatcgactcagggtataatctcgtgaaaagaagttgttttatcaccttgtttacgaatcgtttacacgccgacatacgaacaaatatgtatcagttcagttgctcttatttgccttgttcgtttctgtagaaaaatacaaaaagacgaattttatagtcagagctaaggagaaaccatcctcgtttatgtttgactgtttcgaagcattatcagtcgcaaggtaaaaactgagtttagggtatctcacaatgtatgggtgaaaaaggatgtgggaccggacaaagaaaaagaagtaggaggaaagatgtaactgatttaaacatcatcttttcaaccgatcaatatcatctcatctcatctcatctcgactcgtagcccaccgttcgcctcgatcattcagattgatgaataggctattctctctctcctcccctaggagactcattcccctcacaggaagaaacccctcgatctcatcatcttcgatatctgtccgatcattcttaatctctcgaccggcccaaacggcatttgaatctagctcactcataaaaagccaacctagatcgcttgtctcggtaaactcgctcaccccaacctcgctcacttcgggcccacatgaagagctt

SEQ ID NO: 3092 - DNA, 35180 bp, Xanthophyllomyces dendrorhous
gagcttcctctaccgtacatcaatgaagggggtttctcttcttccaagccccaaatcgctagagatttgatgtcggtttcaaagtttacggtcgtttttgcaatgtcgatgatcttcttcagcggggtttggttcgttggctacgtgtactatctcgaaaagatcaaactcaacgctccggcatctctgtgggaacttgacaagacaatgtctcaagcagctgagtggggatgggagctcgagaacgatgattggacgggcggagtcgcgggtgggaccagtcccgagctcgggtgggatacaaggcgagcacttctctctgcgtgggcggccatcacttggggtattaaaccccaagctgtccaagacaccgatttcaccggtgaaggagaggaacatgaatccagcgcctttgcaggcgcgttcaaaggaatgatccaagccgagaaggataactttcatcggtcgttcggtcgaatgccggatgagttcaaccagggcgaacatgcggtggcagagatgtacgttctactagcgatcaagcaaagtgaaacgatgccaggagtatggttcccacccccgttggatcactcgattgataacgatcttccgcccgaggtccaaccagtttctataagaagaccaaggcctgaaaatactattggcttggttcttacccttcgacatgcccaggtccttgaacgggcgattgcgcccaaggcgctgagagcagcgaaggagctgtaccgacgggtattacacgtagtcgatggcgttcaaggtgcagagacgctcgaagctcagttagcgaggaaaatcgcagatctaggaaagttgacgggtgttccggaagaggagtctgaaagttggttgcgttggggaattcataggctcgttggcattcatccgacgattgcccctatcgacaagatctccgaagagcttatcgtctctggttctactgccgtccccgccaactcaccatggtggaagcggctgagtattctgtcctcccacaatgcagcttcggttgagcccaccgcttccttgtcaattccaaatccgtcaattgatgaaattctctctctcgcttctcaagcatgcctgcctccatctcgcacgcgcgccctacttgcgcttcttctctccctttcctccctccaatctaacccggccactcttaatcaagcccagtgcactcagacttcagttctctccttcctctcggatactttggcggcgctacctgtgtctgtatctgcaggggcattcgcatacccacctcaacaactttatcatttgaacttgaaactctaccaggcactgttctcgattcatctggccgaagttatgtatgcctctcggtcgactgccgatgaagtaaagaatcgagaggacaagcttgaattgactattcgttggttagatgccgctttccttcaagcgagtagcttggcgttcatcctcacgtctcctcctcgatcgacccttccacccacgctgcctttccttcctccgccaccttccacctcctcgaacacatctgaaaattcgatccttgctgccacactggctggcgtaggtaacaacaccagacagccaggtcttccggaagagccttccttccaattcacggataatcctgttttgcgttcaccctcttcagccctattgatatcgtcccgaaaagcagcagcttctgcagcaaacctccttggagttcttctccttcgtgaaccaggtgatctcacagtctctcgactggagaaagtcaggcgataccttgaagcagccatggcctatgaagggaagccacctccgttggatgaatccgacttggggttaggtgggaaggatgtgatcgatgacgttgaagccggtggagtttggagcaagtattataccagttggcaggctatcaggcagatggagaaggaaatgaaagaatcgacttaagaagtcgaactctttctctccatgagaacagggaatgaatggagaaaagttgtacactgttgtaattgtgtttgatatatctcaattgtagccccagggaatcttgtgctctcttcacaccaaacgtaatgaaaacagaacataagacttggactctatcgcgagcgaagagaatgaacaaggggatggggaaatgtatgtagagatggttgttcagttggaagcagaacaagatggaaagaagaaaccaaaacaaaacaaacaaaacgaaacgaaaaatctcacgtccagaccaaaggaaagcaaacacatttggagacgaacgagtgtaatcaagagataaaagagaagaaagaccccgaaaggaacggaacggaaggttgaaccctgggttttctatgtgaatgatggacgatggcagggcgagcaagactcaggaaagcgatcaggcgagaagatgaatgcgagattttatgattatcagaagatgggatgataggatgagtgacccgactggcgagaggaatcatcaaagacagaggagacgagaggtataagtatacattagggatgtgggtaaagctgagagatggtagtaggttaggcaaaagaagagtgtatatatagagagagaaaagagcgctcaaaaagaaggaggataagcagagagcaaataaaactctgaggttgctatccttgtgcaactttcgatcggatgaagcgagaaggagaaagtagtcaaagtctatggaaagaaaccgttgaaggagaactccgaattacttcttggcctgctttacacgaggcttgcccatggcatcgtatttatcctatggattgcgtcgattgatcaatccgggaaattaggtcagcaatacaatccttgtgtttcgtttatgcggacaaactgagaagagaagtacctgataattcaactctcgacggaaaagcaaaacccatggttcgggtgcatgcacttcactaaattggttgaggcagaaaaatgaggtgtcaaccggggatcatgcagacgaacccttcaaaagctggtttgacttactagtgctcccatcctagacctattcgtacagacatagaacgaggcaatcgagatatcagtaaccttctgtttgaatggagaatgtcgttgttgaacctggttgatagctgagcttgaatcttgacttactctgcatgattccaatcgacctgatgtgtcaagtaagtaccatcaagaagagggattgagaaggatttgttgtcagtccgcaatctaacgacaaccttagacaaagaaaccatgttggactctcatctgaaattgagctcaagaatagtacaaacctccactcggtctcagacaaaatccggagaactccggtgtcgcccggctcaaacattctagacagaagggaagacaaaagggggcaagaataaacgaagtataagctcaataacgtttcacgctttctgggcgactgatttcagcagtcagaaaaggaagaccataccccggtggtatcagtttgagaagctgcttgggaagaatgacatgtctgagtgtgtattgaaagacaggatcagctccctaaaattcttcagaatctatgctagatccaaacgttatagatacgaagaggagcaagcttggctgacctgtattcccactcgtcgtcctcgtctgacaggtatgttaagggttcgaaacgagggatgtcagctagttgttctcaaacaaggagacgccagaaagctccgaaagagaaactaacacttatcactatagaagatcctgaaggattgagaatcaaacgagttttagcataaagcaaacaaagaaattgagaatgtgaaaagaaaaaacacagaaaaaggagatcaggaaagaaacaaatggcgataaagacccataggacatacttttcagtgagctcctcgtatgtcgggtttttagacatgatgtttatgaccttctagagtacagactcgcgcctttaatggtgacctctaagattcgggataaagaaagcctgaagaaactgagggagctgtttgaggacaggaaggagtgccggggagaaatggataggcttagggttaactcgtctatgtgatatatcataaataaattcaagaacgttgtctaagtgattgatcctttgctgatgcctcttcgctcatgtagttcatcttatagtcgtaatgtccaccaacatagccagaagtcgaggtatgtgatcattctgaagatgttctttgtaggagcgaaccagagccagaacgacactgagatgataggaagatgatgggtaagaccgttacccagtggctgacgacacgatgctacatttattctgaatttcagccaagatgacaacaaccaaggctgacctatcgaaagaagcaacccccaaagttcagccggaaattcagccatacgagaaaccaatgaaatggtttgacggactcgtgctggtgcctggacagaatgagacaagaagtctaatagatcaagacccagatctggagaattgggattggtacctgaacgcacggttcgttatgtttctgcttgccttgctgtttctactcaattcgcgcgctccatatgagggacttaccacgtcgcttgggtatatgcgtctcgactgaatccacacagcttcaagcattttcagcagtctcttgaaaagctaaagactatatatcctggcggcttggatgagtttagctctggatatctcaagatgggacttgtagtcagtaaatcatttgggatgccattgataacaacgtacaataaatcgtgttaacgatagccgtcacggaatagttacacgatgataattcaataacatacactgaatgggctgaaggcattatcgaagcttcgctaatcggcgacttcagtaagtaggaattacaagagttcatattcctcggcccgtgactgattaagtctgatactttggtggttcttcagacgctttcaatccttccgcgcaccttctcaagcatgaaatagacgagcacaccggttcttcatactggactatccatcttcctgtcatggagaatgggcaaccacaaataccgcttggttcagaagtaaaggtgggtctgtaccttgagatttggtcaactgaagaagaactttctaggctgacacccgcgaatacagatcagaataactctgccatcgggtgaatctctggacaggttcccagcatgggtgcttcgtgcaactcaatctcagaatccacctgaagttttgttcagagcgcgaatagagcgactcccacctatatataatggtgcgcgaccactagctccccgaaccccaaagttagtgttgctcttcgagatttagacattcatggcgcgcctacgtttgtttatgcctaacattttgcgttcccatttgttgatacccctcgcaggatttatgaagctcacattggagccgctacgtccaaaccacatgctataggcacttttgaggagtttgagaagaacgtcctgtggagagttaaggccgggggatacaacacccttcaactgatgggaatcatggagcatccctattatgccgtgagtggattggcctctaaatcgatcttggaaacaggcagaacgttgatcgtcgtatgcgtgtctgctgtatcctacgtagtcctacgggtatcaagtctcttcgttctttgccgtgtcgtcgcgatttggtaagaaaccatcctagatagcttcagtctgacaataccactttttcccacatactcaagatcttcttcgttcgacaatcaggatctatcgcatccttgacatctcttattgatgcagctcacaagcaaggtatccgcgtgatcttggacgtagtccatggtcattcgtgcactaacgacatggagagtctcaacatgtaagagactatgggtttgtgtttcgatgctgaaattcttatctgactgaacgtatgttacttcttggtgaaaaggttcaacggcacaagaggaatgtacttttcggaagattcgaaaggagatcatcctatttggggaacgtaagaaccctaacgttcggacatctttttcacatcattgtttgttgattaaaagttcttaccctgttggatcagccgggtgtttaactacggacatctcgaagtccagcgctttcttatgtgggtctatctgaagtttctaataatttctacagccgatgtactaactctatacgctcaagatcaaatcttcgttactatattgaacgaataggatttgatgggtttaggtttgatagcgcatgctccaatttattcaaccatagagctgtaaaccagagctggactggaaattatggacaatacttttcgagtgatacagtacgctggatagtttctacaagactagactgtattccaatatccgccagaccgaaactgatagacacacgccttggacctttcgttgaatatctataacaggaccatgcaggcgttgaatacttcatgctagtacgtcgccatacttgctgagtttctgatgctttgtgcttatcgagcttgttccgtcttgtttcatgcctctccttcatcattcaggccaaccatatcatcgtatgctcgtttcggactgttctcagcgatgtgcaagttgtttcctgatggtttctttacctttacctctcgatcaagaaaacactcttcccttttgtgacaacaatagcagaagacacggctgggtttcccacattagctctttcaacagatatcggaggcttgggatttgactaccgtctgacactaggaccagcataccactgtgagtgctgaatcccccagcgatgaagcatacatgtaggataaaacaggagagattctaaaaggatgtttatgtgcattttacagtgtttcacttattgaagacggagccggatgatgcgaactggtctgtcagggatatcgttgcttcattgggcaataggaggctgcaattaggcgaaaaaactatagcgtttgttgaaagtcgtatgtatttataccataaatcttctttggtcgcactgccaatccgatctcttatttcgtagctgacgcaatacattttcatagatgatcaatgcatagaaggtggaaaaacgatgtctcagtggctttttgacgatgagatttatactcagatgtctgtcttccagacacctacgcccaaagtggaacggttcgtattcctctcgttcatcatcacgagagaccatttttgttgatagttctgaagaactacttgtttcttgtagagctatggctctgcataagatgcttcgactgatggtcttcgcctttgccggagagggttatatgagtgagttccgttcaacttcggtttggatatgccgccttttctgattttctggatgttcattgttgttatttctcattcaaagatttcatgggcaacgaagtaagcgttcttacaccttgttattgatatctgtatcatgttctgatccaacccgaccttcgtgtcaatccaaccgtttagttcggtcacccggaagtgtgttcctctcatcctgttcgctatttgtcccactcacccatgtactgacgatctccatttattcttctccagtggcttgttttcccctcggtccagaacggattccacaccactcactgccgtcgtcaatgggacctcgctgatttttcgcgcgatttaagatatagagatctcgcccggttcgatcgagagatgttggtggctgaagaaagaggacaatggggaagcgcggagcttggacatgtatggacacaagatgaggtacgctctccagtctttcgactttcgatacctctttctttattatatctgttcaatatgcatggagagaacaggagaggtggcttatttcttaagttcctttctgttcttgtaacaacgacgaaaacaggattcgaggttagtagttttcacgagggcaaaccacttattcatcttcaactggaacaccaagctaccagccaaagacgacaatctgccgattccggagccatgggcgcttgaaggccagtatcggatcgagctaagcaccacaagcggagtagctggggcagttgtgaatgatctgaacaaggtccgttcgaactctatcgttcgaatccgcttttgcccagagactgattgttgtcgtgttcatgttctcctatgtactcttcgttccctatccagctcattctccaaccaagatcggcagtcgtcatatccacgttgatggaactctcagcataattagggaagaataaaatgacgattgacgtctcggagattcagagactggagtaaaaaagagaaacagttcatgtatcctcctcatagtcccgatgccatctcagattgtttttgaaatctgtccatgtcggccagatctaaagtagaagtatgagccgttataaagacttggttaacttctcaagtagcgcacgagacaagagtagttaggggagggaataggaaaacaagttagacttactcggccttctaccctggccaatattaatgccatcggtactggcccataatcccttgaatctgttgagttactcaaattgtctccctgaagccagacatgacctttcggcactctcacccagccctttccaccatccttcccggacaccgctcttaggtttcctggatcgacctcaacagtatctccttccattgcgatgattcgtttgcctaccgttcggtctggaaggtagggatgtgtagcgataacgaggtccccacgttggaaaggggcgcaaagaaatgatgtagaggggtagtaagggagccgggaatagtagatccaatcaccttgaggggcgagggtaggtagcatggattctcctttacattcttgtataaatcctattcgatcggtgattaagtgaagaatgcatgcactctgcgacaagacattattataagagaggaccagatgaaaagcggaaaggagcaaacgttagaggttgacatccaactttcagcagaggcgttcaaaagagagacctacctggacggtgacgatactagcctggaacaagagccgactttgaacgtataacttctcgccaactctccgaaagaaagtcatcttctatgagcaagaatagatgggtttgtaccgcgcgtgtatactagaggatcacaggataggatggatgggttgtctgatgttatatcggttggtgtgaatgtgtagaggcagaatcatctggcggatacttgttccttcttctttctacgtcctcgaccaacccatcatcgataatctctgctttactcccaacgatggctccgctagcccctcccaagccagcccatccgccacccgcgaactggccctctgatatccactatctgactgctcctttctattcaaacctacctccggaagtcacagcgttcgtccggtcgaaacaaccgccccctgtacataagccgaatgacagagttgttattcagtcagtcatgttccattctatcctatctatcatgacactcttgtctttccatagatctagcccactagatgtttctctctgactagcttgaacggtgactgacgtatacttcaagggatgcgtgtgtcgatcccataaaggttgatcaacaaccctgctcaccccgctcatggtcaacgggggctttttgcaaagaaaaagctagaaaaaggagaactcatcgcttggttcatatcaatagtttgattcaatcaaacatctaggacatgcatgctcatttttcatcttatctgtatcctaaacgcttaatctcttggtaggtatacaggtcatgttcacctcgacccagaatctgatcctgcccgacgtgaacaacgagagaagtctgattatgacctcacgctcattccaaaactgtctaccttgcgtcctctgacatcaactcctgaaccctggtccgacctaggcgtcgccgttgatgcttctcaatacggaaacgagtctcggatgtgcaatgactttcgaggcgtacccgtgcctgctgatgcagttcctcaacgaaactcgaaaggaaagctagtcgctcctaaaagcaagccaaatgcgttcttctactcggtacgaacaacgacattgacgactccaaaggtgcttaacccagacttgattacgccggtagagagaatgaatgcgccgaaaggagagttacgtatgggaatctttgtgttgtctcccgagggcattgccaagggggaagagatcttgatcaggtcagtcttgattcatagtttcgatagatggtcattctgctcgctcagtttttgtgtgtgtatgttctcgatgggaattcgaacggcctgcatctcttctcctgtattctctttccctcgctattcctcgcctttaccggttccttcaagggagacagttatggaaagagcttctggtcatctcgaatacaaaacttggagggatagatgtacatgttatatgaaacaagagtcaagcagtaaaagattatatgcgcatacactcaacataaggacacggagattaattagaaaagcctgtattgattttgagaaacatgactatgaacgatcgtagtcgaagtcgtagtcggagattaaaatttcaacacgctcaaacctgaccgacaccaactcatttgcctctccaccttctcattttctctcacactttttttcttactcaaaaaagaacgattccctcgaaagatggccggtaaacgtaaggccgaggctcagggaagctcagatgtcaaggtaagtgcaggaaccttttcaagagatacagcttgtatattgaaccacgatcctgatcctgatttatggatataacgttattatgacctgcagcgagctacaaaatcaaagcctacctcggatgatgaggatgactttatctcagacgatggacaagatcccatgctctctgccatcgatattgccgatgatggcgaggattctgggagttctgaaggagaggccgatctaattgatgatgaggccgaggaatcagctatggacgacgaggaggaagaggttgaggaagaagagggttctatggaggatgtagaagctaataccgctcaagcttacggccaaaagaagggaagctccctttacaaagctcctacaaacgaggagatgcagagtacgtctagatcaagctttctcggtgcttggtttctctgtaagactaatatgagctctttcttacagccttgaaatcgggatcaactctgtacaagtccaacttgtttagtatgcaactcgacctacttcttccttcccttcgacctcttcccgtgtccatgcatcctgctcctgccgctctttccgccttgacgtcgaccttacagtcccttcgaccttttctcctcgccttgcctgccttggcaaccacgacccctcaagcgtctctcaagcagtaccccgacctgccctatcctaattctggaccagctgaggactctaactggaagatgactttcgttcctcccaaagaagtacagatcgtaggcgactgggccctcgagacagtctcatcttccaaagcttccaagaagggaaaggggaaagagggcgcggttgacatggcgctcatgatgcctgaggagtactttcaggaaaaggacttcctcaacggaaggtttttcttcaaacagatttactggctcggtgtgattggaaaggcacttagcgatcagaccgaaaaactaggactcggggctgtcgaatggagcgtaactgatggaagcgactggaagccagttttagttctgaaatcgaagcagggtaagcagacaggatttatgatggagacatggttcggagtttctcagaggctgattttgccttcgggcccgtgtcttgatgttactagacaaatctgcaaaagacttttccaaactcaaccttgttattacccttcatcccaccattcctacgtccctctttcctgcaaccaagctctcgccttcccgaaacaaccttcgacctcccccctcttcagccgccccgccacctcccactcctcattataatgctcagattctttcttccacccttcctgctcaacatctcgtctatctgcatcatctctcacttgctctgcctgcttacaaggatgcatctctcatgctccagctttggggtcgacagcgaggatttggagccgagatcccttggcaaggctatggtggttggagcgggtggtgtcagatggtgatgggcttgcttgtttttggtggaaacaacgagaagggtaagaaagagagcggaaaaagactcggtcgaggcatgtcctcctaccaagtcttcagaggtgttctcgactttttcacaaagaggagctttttcacccagcccgttttcctgcacactcaacccaacgcagcgccctcagctgagaaaaagatcccgacagaagactggatgatctctggattattcgacgctgtatttgtggatccaacggggagtgttaatttattgagcggggttgagagaggtgtgcttgagattttgggacaggaggctaagggaacgttggagctgctggatgaggatgactacggagaggagaaggaggaggtatttgatagcgtgttcttgaggaaggctactggaggggagagaagattcgatctcgtgttcaggtatgtttcctcctttcttatgccgtacacttctgtacttcataacattgtttctcatttaattgcccataaatcaactagaatcgacatttcatctgctaagccgctcttgcagcctgcacttgcccgcctcgaccagccctcccgtactgctcatctgatgacgtctgtgtcatctgttgtaagacgtgcacttaacactcgagctaagtgtgtcgtctctcagaaggccgttccttcaacgacgacgagtagatggactttcggatcccccaagccgactcccgcccccgagtctcaggtcattgagcttggcatcattcttgatcagagagaggccgctcgattagtcgaccacggaccttcggctgaagagcctgaggcatcccaagagttcagagacttctggggagataaatccgagttgaggcgattcaaggacgggcggatattggagagtgtggtttgggaggtcggacctgctccagaggagagaagtttgatcgttggacgatccgttcgatatattcttaaccgacactttggtcttgatgcggatgagattccaatcgagagcctagccgcctaccttcccctcctgcgattaccagcctcggccaccaacttgttgtccaccgacgcttcatccgaaggattcaggccagctatagacgcgtacaaccagcttaccaagactctgaaagctatggaagatcttcctctttcgttactcaatatcttccctgtcgcggagggccttcgatactcttcggttttccctccgctgccgattgataccgaccggttttcacttgctccagattgcctcaagtacatcgagccactggatgtcgtcattcagtttgagtcatctggccgatggccagatgacctgacggccatccagaagatcaagttggcgttctttgaaaagattgctaagcagtttagggatcgactccgagggtgcatcgtgtctgtggcaatggacgaaattgacgatgctgaagaagccgtgattgaggataactgctcgttagaaatcttcgtcccttctgggtacgctttcagacttcgaattcatcacgatcgagaacggttcctgttggagcagatgattgcagataaaaaatcaacaaacccgcatatccgacgggttgcccaaaaggctttggatattcatcattctcgattcacctacctcccccgacaccactccgccatggccgccttacatcacttgtatccctccttttcgacgaccgttcgactcactaagcgatggttcgcatcgcatatgctttcctcccacgtttcggctcagatgatcgaactcatctgcgcgcatgtttacctcaagcctccgccttacagaacgcctgcttctccctccgctggctttgcccgagtcgtaggattgctttcgacttggaaatggaagtccgttcctctgtttgtgcctctctattcagcagctgggatggaggccggtcaaaaggtagtgttccccaaagaaaagggggcactgataactgagaaattcaagaggtttagagctactgatcctatgatctctcatggagcattcgttgttgctaccgaggaggacttatcaggaagagttttcggagcttcgagtcctacgaggttggttgcaggtagaatcacccagttggccaaggcaaccattctatgtttggaacctcaagatcaggttgagccgctgaacgtccttcacgttttcaagactcctacttccgactataacttccttatccatctcaaacctgccgttctcccccgtctgtcgcaagcattagagcccaaccaggccgcttgggcgtcaaagtacaagaacttatcgacattgcaggcttctagctcgacgtatggtagagagcttcgactccaattcgatcctgttcagctcttcattcgtgatcttcgaacgatttacggagagacattcgttctcttccaagattctctcggtggttcagtgatcggtgggatctggaaccctactcttcaagagcctcgaaactttaagatccaaactggattctctggccgacctgtcgcgagagaagggggcgacaagaagagccagatgatcaggttgaacgaggctggcgttgtagcggagattgagaggctaggagagggcttggttgagcgtgttcaatttgaagcgtgagcttcgaatataagatagatttaatgaactctttttctcaaaaagaggtggtcctgctctcgttttaagcgagcgcaatcttaaaaaagagaaatatcaacttgaactacatgcaaataacataacataatgaggatagaaaactagtcgatgacctgacagatcgaagaaagttaagtacaagcgacgcctggtcgcgttgaaactacgaagattgaaggcgtagcaaacaatgtgtgaatcctacataatctcccaacgctggtttcccaagctgattaatcgattgaaaagctcatctcttctaaccactccaaacttgtatgtaacctagagaagagagaaaaagcaagaaagatcagagactgcatctattgactaaatcctaggaaggtgacaaaagggatgacttcacctcttcttcgattttcctacccacctccgaatggtcatgaccttccacacctgactcagaactggcactccttcttatcgtcagctctagtccagctccaccaacaccttgaatacctacaacccagcccaccagcatccgaccctgccagcctcccattccaaatcgtctgatggccgttaggtcgtttgctgaaatagtcaaagcaggaagcggcggtggttttactttctttgctttctttttttcttcctcctctttcatgagtttagagagattatcatggggagtgggattgtgtgatgtattgactggtaaggaaggaacgggttcggtcgtgacggatgtaaatgtaatgtcggaaccatcaatccgaatccagcctggacgtcctgaacgagtggccaaaaatgctgagaccacagaaattcaacaagaacagaagttcatgattagtgagcatgagaattagaaatgactggaaagcgaaacatgttcaagagaaagagcgaacagcagggcccttccttgtcttgcttgaccggcataatcgagagtagcgtccgtgcggcctgattatcaggtgaaatattgagcttttccaaagcagcctattttccgtcgatacgatcttgatcagcttgttcataggtggatattgacaacaagatgtacacttaccatggatattttattccagtttagcttcttctctccgctgtaatatccagcgctctagtcatcaggaaaatataagtattacaaaaaaaaaaaaggtcaggaaccccataatcctcgagcttcggattaaagaagcatgtctaaaaagtacagcccggattacatacttcttctgtgagccttgctgtagccttcaagaacgaagaaattctattcctcccatcgggtttcttctcaacaaccgctgcctctttgctgtttgccgtttcaaattttacatcgagctcgttttcgcgctctaaagaactggagataaaatcaccgtctgatccatccatcttgagttcatgaaccgaacgtgaatctgacattgaagaactcggagggatcgtagaggaaggagcgggtcgaggaggggggataggggtttgtttaagctcagcttcacgcaggaggcggagagctagttgagcatccgtagggcagcctgctaggactccactgagagtgtcgcgcaaaaatagcaagagtttcagtccattgccgaattctcttggcacaaactcagattgaagatcatactttcgaagttcaatcttctcttgccagccaggaagatgctcattgagaaggataacaagttggtccaaggccggttgaccaaagaagcaaattccaacgagagctgaggtaacccgagagagcacgtagtctgagagaacagtggcgacaacttaacatgcatgatagaatcaattcgatgatcaatttttacttcttggtggatctgcccagctcagataggataactagagaggagacttgggactcaactaatgagaggaagaagtatcgtaagaaagatccgcgttgatccttcatgagcggagaaaggcggggttgggcttaacgcactattgtgcaaaatttcccgttcgcaagctaagttagatgaactgtatctgcgagaatcatggagaagagactgtgcgcactttgcccaacgctcccatccatcggctaaatcaccgcagatcatcatcactggtcgcccaatcttctcgattggctttttcttctgagtttttttactcgtagacatttcgatccggttctcctgtggcttcttttcctttggatcatccgaaggcctttcttctcgagcttccgtcgcctcctgtgtctgttcagcatctacaccaccttcttcttcgtcttgggcccacgaaggtttaagacctacttccgctaattcctcaagatctgttgcgaactgagatgcttgagcctccacttgctcttcttgggtcatcccggggacgaagatagttgagggtgtcttcgtggatatcgtttgagagggtatatctgggagtgggaaaagaagacaccgggctgaaggaaagaggactaagatagaaacgaagaagagtagagaggctgtgaccagatggatggaccatgccatcatgtatatctatttatccgaggaaacaaagaaaagaggatgattaatggataacgaatgaggttgccaggtggaactgtacacagaagtccttacagccaaaaatgtccctgtccgaagaacattttcccagcttctcaatctgatcatttcagaaacaactcggatggatccaataataacagtgctatacagcctttcaacgtttgatcgaagtttctccggggcgaattcttcttctggcgagggctgaaggtcgagcagaggtgatatagatgatatccgaggcgaacgactgggaactacttttacccatgggatttgctgataggtagaaggcgtgtcaaccagcccctgataagtctactctaagccagaaacacctgatgacaaaccttatcgaacctcctgagcaatacatcgacctgctcgtttgtcataccttctacaaactgtttttcctgagattttttaggcagaaagattggttcagcttgcttgcgtggaggcaaaggcggaggtactgctctcgatgtcgacgatgggcgagaagggtgcacagatccaacgggctttacgcaaggattcatggtaggatcgcgctataaagagttagagtgtacgagaattcgagcaagtggaagcgagaaatcaagatggatagatagaatgtgatgtttcaatcagcccttggttgaacattatcaaacgtcatcagaatcacacagctttaatcatgtaatcacgtgtttctatcaatcatcttacaagcaatcagttcacttttaaatctcgtcctgtatgtccgaatgatacatcatcatatcttcattgtgaagcctgttcataataacagctcagacatcaacatatccacctagcgcgacacctttagtctcatctgaaaaagtctggctggaaagggagacttatcagagtgtatggctatcaagctctcgaagcacaaatataagatccgtgaagaacttgaaatattgttgccactgaggttttgatcgtgatgtactcagggtttatgttatgtcttgtaactgatagcgagcgtttttgctgagattttatggcaccatgagggcaacatgagacgaccaaggtgagcgcgaggaaagaagagtgagagaataattgagaatcatacaaacattatacgtctacttattctctgttttcaagttttgtacgtttggccaacaatcctttttcaaagatttcacgccgatgaacgctaagacggcggcgatacccgctaaaaggatccaaaccggtgctttgacggcaacctctctgctaggaaagatagagagagaatgtattgggtgctctgaattgaagaatggctgcaaatatatatccttgtcattcagatgtgcctatgggccgagcagaggaaagatggcaagcatacagtgacgagtgtccagatagtgtaccaaatgagacccaagctcgtgaagagtagaagtccggctcctatagatttatcagagatcatctgaacagatacaatagacgagaaatgtaagcaagttatccttttgtatatctcaaagataacagagctactcactacgttgattgatggttaagaagaaactaggaggaagaaagaccataggagacaatactaaaacggtcacgtgatcccattccatcagcgctcaccccaaatcctcctttggccctcactgaccatcatacccacaacttacacaaccaacgctcgaacctctatcgatgtcggactcgtctcaactggttcacctgctatcctcgctggcaaatcctagctctcctcaggagttgaccagtctcactgaacttcttcaatcaacctatcagaccacaggtttgttcatgcatatccaatacaagccgtcccttttggttgatgctctctgacagcctctgacttgcgctctcaatacgtaggggttttcaatcaattacaccaggtcgctctaaatgaatcagtacctagagacgctcgtgtactggcctcgctggtcatgaagaatgaaatggttactaggtggagagttaagatgtgagcacgactgttacctactaagctgttagcctcacctaaccaagtcctttttatcaagcgctgggattaatgactgtatgctaatggacagcttgctgcgttgcttggctgatttctgaagcattatacctgaagaagataagcaaaatattcgagccagattcttccaattcttgacagaacccgatgtgaccgttcgttcagcatttggtcagccttggtattctgttttcaacatcgagtctcactctgtcgttttctctttataccgatgtttgatctatacagatatcccaaatgcaattctggacgatgtccaagatctctcgtcttgactatcctcgttcatggtcagcctaccctccattcttctccaatcgtgggaatcaatctcatcattttttccaatcaaatctgtatatcgcaggccagatttgatgcagaccctgaagcaacatctcctgcaggctgctcatgctcggttctcctctacatcctcttccacggaccgatcgactctacgcaacactctttggcttctcaatcgaataataaaagaatgggtcactgtccggctaccaatcggtacaaagtccatgggcgagtttcttcaattactactaccagtattgattccgctgttggattcacttgtcacgctaccgcgagaagtggaggggtcagaggactcggagtctgctatgctctgcttcaagctcgtcgcaaggttaatagggtgggagtgggcgagaccggcctctactcatactactgagtcggaacaacgcgtccgttcaactttcatctctttctagcaaacgcatgcatacaaacataaattgactttttttccgtttcctactcaaatcacccttctcttttgttattgctaatttgtaacgatagtttgccggagtattctctacatcaattcagcacttgacaaacttaatggagactaggaacgcgttgatcgcacatctagtatctgctactggtaatgcgactctcgccgcgcgcgcggtgctcaagaaccttacgaggcatgtcggcagcatcatcaaattcttcaaggtcagttctctcccaattttgtctttttcgaaaagacaggatgaaggttgacgtatgtacatatattgacaagatacgactgtaactttctgcagacactagaggagcataaccccaaaggatttgtctcactcccttctgcaaacgagatcgtgatttacctttggaagcaacttaaggcagagcttgactcggaagacttttctaatgaggatcaggaatcctctagattccctacaaagttcaaaatcctctcgttgttactttataagaatatcttacccatttgggctacaagttctccccctggtgagattactcatatacgctctccgtgtttcttgagccaatcgagtagattgtcgttagacgagagattcggatcattagactgatggtttctattttggactcacccgcgttttctgtactcgctagttctcgacggagcactcattacagagacattcaacgttcttgtcgtgaagattttaccattatcggtgcttgatctagagactctggcggatgagcctgaagaatggtgtgtcaatgaaacggctgggaatgagcaatggacttatgatcttagagtgagcttttcgattcagaaatatatccgtttaaatcagttgttctaaatatgtgattcgttgtagccatgcggagagagagtccttctagcatgtgaggcgacgaacatcagtgctatctcttatctactttcatctcgtactgatcgaataacctgtttacagtaaataacgcctgccgcaacagagaagatagattgatggataggttgatgcaagacactcttgctcaatcaatgtgtaagtacatcgtctcgatattttatcagttcagatacataggcctttctcatcatcctcgtcttattaatttgtctgtcaatgtttttcttcctcattttagcaacacctattacggacgaactctcactccgacgcaaagaggcagtttatgccgccgctggccgattggcacgttcgcttgtccacaacccgaatactcctccaactcagtttatcctcgctctgacagaagaatgtaaagcacctggaccagaataccgagtgttgaaacgacgagtggcttggttgatcggagagtgagttttgtccttgcaataacgtttctcttgtctgtttatttaccgccagtaatccttccgggcgaataatctacatacagattggttgatgctgaggaagagctcgctcaaggctccttgatctgggagcttttgatcggtctgatttccgaccgaagtgaaggatctgatattggtgtccgacttacggccgctacttcccttaaacaagccatggatgtatgtacattctattttgatttgttggcatgtgtatggtagatggtgaaactgacatcatatggttcgagaacgtcaacacagctttgggaactagattccaattgtttcactcaatacgttcgttgatgcgtaccttgttgcatctttttattcagcgacaggtctcactgatgaattgaaacgaaatacaaaacaaaaacacatatcagatctctcaaatcgcggatggtttgttcacactcttaggagaacttgagcttcttgaaggaagacgtcgtgttattggatccttagaagtcagtcctcattttacatttgatatcctattatgtttgattgatcgacgaaaccaaccggtcttaacgaatcaaacaggtccttatagagcgtgtcgggttagaaattgttccgtacattgatcggatttctcaagcgataccgactctttggtcggatgcttcaagtcaagaaggacaatggttgttcaaatcatccttgctgacactcatcacaaagctagtcgaagtaagttcttggtggactcgtcttcactgtatgtgcggctttgactctggtcaatccataccatttcttctctcttgaaaattcgttgttcttagtctgcaaaaaccaattcgagtaggctctcgacgctctgcatccaactccttggtgaatcacttcgaggtggagtaagtctttccttcctcttttcctttgtatcttaaggttgtctgaggcttatgatgaatttgtcggtggtatcgatgttgtaataggcaaaagttcaactagaagaggacgccatgttgctctggcaagcctggcttcgaaacacctccacacttgatgcggagctcatacagctggtgcccgcagcaattgaacagctcactgtcagtcgagaccaagttgagaagggtttaggaatcttggattcttatatgcttcttgacggacagcgtatatatcaggtaaagaacgtcattttcttgcgttcctggtgcttgcttatcggaagttagagtataacaatgatgacaagctatgtgttgcctttccatgggcatataccttctacaggagtttgccgtccctatatgcgccgtcttcaaagacatcatcatgacctcaacacctgcggatgtgctcaacgtgctatcaagtctagcaatccatgtacagatagcctctgcatctttctgggcggtagggatgaacaacaccggtccgtcttcacatcttcactctaggtagaatctgattactcacactgttgttcgtctgtcagccctcttcactgctttgttcaaaggagcaacggccaagaacgttggaaacgcgcttccctattacacaaacgtctttgccgagatgattctccgggcttctacaagtaaggactccgatggtcagccaaaccaagctgaattcttcacattagccgagatgagcggagtgtcgaaagctcaatttctggacttctggtgggattcggtaagtcatcttgatatgaaagatctgtcggtcagaatctgacaagttgagcgagttaagaactaattctcgtcaatctcatacagttcgatcggattgctaggtcgtccattcgaaagcgtgttgcacttgcttctgctgctctttgtccatccggcgatcctgacattctttctcgattccgaggagagtttgtcaatttgtttttagatgtcctaggagaacttaaaggtaggccactttcttctctatctaaatatatgctcgaacagttcattgatagatatttggggttggttctagaaacggagttagacggagccatagactcgtcggtttcggctttggatcttcattggaaacggggaactgaagctccgacgttgggtgatgccgagggtacggccgaaggagttcgtttgcaagctgtgcgtttgtctcccttattctggttttgaagggttctccgctactacatatctatagtttgtctagaatgactgacaattcagaaaacttgcattttggcagctgttcaacctagatccagtttacacagccagtctcaaaggttatgtgagggaaaagttggccgagacgcctcgtctagccgaatacgtcgatatccaagagtatgtttctgttcctcacctgattattcttgcaattgcttcgtttctacttcatgataggtttgagactgactagtaaccctttatacagccctgctttcatcgaattacaggcatatctcgcttcgtgaacacccttggatggttttccttgtaaacaagatactattttattttactcggcctgatagtcgtgttcattgcccaaagccttttatgaaaccgtgaacatctcttcgagaatcatttgccttaagcggctgattggacgatgaatcgagaacatagatgtcttcttcgacaaatctaaaccggccatcgtaggtgactagcaggattgtcaatgagcgggttccgtaccagcgaggttgactattaggtgttgatggtaatctgagtggaggaatcgttacagaatgcttgaatgttgacctgtcgatcgttgggacactagggctatttcaaaaagagagcacatatccgtgatggtctcacgatattgagatttcatatgcgctgaaagagttataggaggcagatgaaactgaattctgagacgtacctcatcaatgtccggaggttttcaatccaatcttcgtcaccccattttctaccctcatcctcttcttttctcaagagctgttccatctcatgtttcacataattcaccttcacccacgggtcatctatcaccgagttacttagcgctccaatccccagagttcgatcggatacgtctttccatgcttcttcgagcctgtttgaaaaatatccgagctgagcgcgctgatggccacaactagtttcggttgaattgagagtttcaggtgaactctcggatgtgggcgggaagaggtcgaacagaagtagattaaatcctccatatgattgagcactgggagccaaggaagaaatataatcacgtggcctcgaagtaagaaaagatggttgtgaagaaccagaagaggaaattgattgattatttaggtaggaagtgacgagcgttcctctggtggacgggtagggggtctccgggctgggctctgtgaaatttgttctgaatcagtttgatcagagtcgctgtggtcagacgtgagcgagacatatggaaccaaagaacgttttcgtcttgatgaaactcacaagattcccacttgaccagttttgatactcattcccaaccatgttcctcccccaacggtatccaagccgcaaaggatatttccgtctttctctgatgatgctttgagatcgtcaaatctgtaatttgcttgttctgtgggctagagacctggaaggtttaggatcacatactgtcgtaatcgttgatttacgaaatggtcaaataattgcttactcgatgaagaaactcatcccggttattagccaagatgctgaagaatagtatagaagagctccgggctgtgtaaacaatcaatcgtttctggaggtgtggtagttggtaagcgtatacgtgttcctactcacagtttgtatacaggatgagcatccacatcgtatacaacaatacacattgttgaagtcttcgtagatggaggtaggcgagtggttgatctaagttgtcaaggagatgacgtggggcgatgaaacttggaggttggcaaaatcacctctgcagtttcgagagatcaattatacctctcgttcactcatctgccctgaatcatacatttgacccatctgtacatctaacttaactcatgaattctagagcatacaacgaaaccgtcgagttaacagacagagagctcgttggatctaacggcggtgcgtgaaacttgtatgttgttgggtcattgataacccctgattgactcgattaattgatgaattcatttagccatcaggatcctttaccaattcaagcccgcgactactgtgttggatctgtcgcataaccacttgctgggtcatgatggtcttcgatctctgatagatggaatggaagagctctttgtggttaacgagaaacaacccgagtgggcattgaaggagttaagcttggtaaattgtggattaggaggaaacggtgaagatgtcttgttcatttgtgaatgttgatcaatgtatgatgctgattctcttcttgtctcatattggcttgtgcttcgatcgctatgttatagcgaccaatctttctctcatacagctcgctagacttctcagcttgatcccttcacttgagctgttgaatttgacaaacaatgatctcaatgacctccctgctcccttactggactcgatcatgagccatccatcccttcagaccctacatctctcaaccaatcctcaacttggtctctcatttcgtccaggaactcgttgtgcaatctataaactcctcagccggctgattgatacggcttcgaccagcactctgacgattcggagattgtcattgaacgacacagagatccctgccgaatcgtgcggaccactccttgagcggcttatttccctcggttctcgtggcttggaggcacttacgttaaatatgaatccctcacttgaacggtattcgcctgtcgaccaagatacctcgttcgttgactcacgtctccttcgaacacttgtgcggatcgtttcggaaaaaaatcgattcattcagaggtttgagatctttggatgctcatctggtctatcggagtttttacaagtaggtctattacctacacttgagcttgcgctcgaacgaaacaagaccttcttgaaggaaacaagacagacagctctgaatgtcttgagagtcggtcgcatcgtccttctcggttcgatgccgtcttcaatcgagaagagccgtcagggtagatttccaatattggatcttcctccagagctcattcaaccgattctatcttccatgattcctggcgccctgtcggaacatcaggtcagggctgttctccggtgggcaagtgacaggcggacattggtggggttctctagacggaggagcagcctgcgcgtggacacagagattgagaaatttaagttcctcaaagcagtgggttgttactattacgactgttgatcctcatcaaggagatagactatgactcgcaggattttatgtataatacagatttatggatgcccgttgtaaattcttgtttgtgtcttgcaagacgtttcttcaagtttacattcaatctggtatcaatacagcaactagaatgaactatagaagttaacatttttagatctggatgagcttggcgagcgctccggaggacttcgccttgctgaggtcctgttatgatgatgatataaagaagagaaggatgagatcaaggtgcatgctgatttagatctatcaaggaagagatagccaagaattgagaaacttacgtcagaaccaccaacatgctttccctgaatgctgtcgaagagaaaatcaaatattgaattggttgatcagtcatttgtcagacaagtttagtctctgcttggtttaagaggaaagaaacgaacaagatgttaggaacagttcgctgtccggtcttctcagcgaggtagttctggatgtcggctccgttgtcaagctcgtcaagtctagaaaggagaaaagaggagaatcagatagagattagtgacttatgttttgatcaagccagatctggttcgacagactcggcttactcgaaaaccttgatgctctttccctcgggaagagaaagctcgttcaacagagctttggcctttcggcagtaagctagatcggggaagatgagaaaaaaaaggtattggtaagcgagattgactagcacgaagacgagaatagactcacggcagtaagactttgagaacacagcgatgaaatggctagagatagcagtatcgacgagttgcttaacggcggcagacatattgatcaagtgagcggatgagtgatgtgggtgaagtttagaaaggtagatggacgttgtaggacagaaagagaaacagatcagatgtaaaagcgaggatgatgatgtaacggattgcacgtgatgacgacaaactgacgtgccggcgttgttatttgtggttacgattctattctctgtatcggacacttcctaataatactagtcaacatcaccatcatggaagccttcagatcatctctcgtgtaagtgacaatcctgtgttcagagaaaaggtagtctcgtgttgtgattaactgactgatggcctgcaaaaatccacaggacggtatgggtctcatcgcctgaaactcactcagagcgaaagttcgacctcgagttaaccattgctcaactcaaggtcggtcgactccgtcgagaaatcactatgcatctgatcaaaaatccctgatacaaacgccctgctgatgacgattctgccttacagggaaaacttgaacttatcaccggaattccatatgactatcaaagtctatcactcctacgatcggatgaaggcgagcttgtgagaagtttagaaggaaacgaccaaaataccttgggaagctttggagtcgtcggtgagctatcggaagatatggtcatctatttatgttcatgcctactgacttgagatgtttctgtcgtttttcacagattggaattgcatcaaggtcagatacatgaaaaatgacttcaccatttctctggcccacctcgcgcaatcttgatacatacatgggctgaaatttgtatcttgataactgcctcaaggtcgccaacttggatcccaacgccggtataggtggaaacttcacagacactagtcaagtcgacaagttcgagttaaccgaggaagagtatacgaagagaccaggtcagtatttgtctggatcggttttttttttgacttagtcttgacgtcttgcttcattttcaactgaccggctacaactgacacattgaatacaaatacaacaagatactcttcaaaactatctcaaaacaaacaagcttggccccaaatatgcttccacgtcggaaccggcaactcctactcctgttccatcaatacctattcagattcatcctggggaccggtgcgaggtcgtcacggctggagcagagatgaaacagcgaggaactattcgttttgtgggagagactcagtttggaacgggcaaaaatgcaggtgcatggattggagtagaggtggatgagccagttggaaagaacgacggttcggtggctggagtcagatatttcgattctaaacccggatatggcctttttgtaagtgtagtatccttttgtgcatttatccttatagtcaatgttcacaaccgattactgatcaattgcgcttcaactcctgcctcacttggttggtaggtacgaccggacaaggtcactgttggggactttcctgaagaatcccttttcgatgaagatgatgaggagatgtagatgcccttcgttgctttaagtgagcgtggtgaacgacctaaatgatgctttgacaatatagattctcggcgttttcaaattattcaaatatagcttaagataatctgtgttatgttgcgtatgttggtagtccttccgctcactttcctcatatggcatttcagtcaatctcatccatcagactatatttcactcagctattcattttgcctatctcttctgaatccatcctaacagcttttcaagaggaaaatgagtgacgatctttccgagggttcgtgttctttttgcttcagttccggcttcccgagcgttctactggatagtattcgctttaagcaggagagatcataaactctacatgatgagggtatctctcgtcagctctatgatatgaatccagggtcacacatgtcgaagtgttgtacatactttcagtagtaacatacaaacagattggaccctaactgtcctttccttttgatggctttacttctgaccccccgtagagctcctcgctttggcggacacacccgctgtatctagaaaacgaacatcctcaaggtcgtcttcaaagccgtcaaaacgacgaaaaccgtatgtgctgcttcacattcaatcgtattctccgtttctagtggtgttggacatggaaacacggggagtaaagacatgtctaacctgaagaggagtgagaagaaagatggtcttgcaatcggtaacatatttggcttgactgatgcctgatttctcaactgcgaaataggacaatggaggattccgacgatgaggaggaacaagttgccgagttggagagtgaggatgacgaggatggagcttctgcgttgtctaatccatatcctttagatggaatgtataaggacgaagccgatcgagcaaggtatgttcgactttgcttcactctttctcttcaagagtttcgatcaatggagtggcggacctgaacgatatgttttatgaaccttccttttctttccatctgaatcatctgtacaggattcaatcaatgcctgagctagaaagagaagagatcatcgcaactcgattgcaagaaaagcaggcttcgatcgataaacgacaactggatgccattatcgcgtcccgaaacgcgaaggaggatacgggtgtcgctcaagcagccaaacgtgagttttccttgtttgtctgtccatggtttaggggaccatcgtcttatccattccttgctaaatggagactgatgcgcacgtcatgatttgtcttattctctccttgtataggtcaacatacttccaccgggacatctcaggccaaaacttccaaattggaggtcctgaagaagaagcgattagaaaaagaacgacggatgactgagaaggtatgtttgtatcctgcttcttcatcactgcctcatcaagataaatccttgagaagccagactgaattgcctcaatggacatttatacgtagggtaaaggcaattattcaccaacgagaagaggcacatctggagagtcgagcgacgaagaggagggcggaatctctcgcttctcagaagatgaaatggaggagaaggctaagaaagctagggagatcattgggttagaagacttggaaagagttcgactgagtagacgacacttagcagatatgacttcatcgcctcactttgaggaatacgtcattggtatgtttgtggtcctgcctatttgcttttcttttttatctcttaagcattttgaaggagagaaccctgacggatgggtcgcgtatttaacatactaggaagctacgttcggtacatgatcggactcggtcccgacaaacgaaatacatacaggatatgtcagattgtcggtaagtaccgtcatcttctgtttcctgtttaaacccagttcggaagatatacttgagagcgcaagtctgacaaatgctgtttgtgttttacacgtaggtatcgaacgtggcaaattctatgaattcgaaaagatgagggacgaccgaaagctcacgctcaagcatggaaagtccgaacgaggcttcacgatggaacaagtgtcggaatctcatttcacattggtaagtttattccttgttgagctacaagaaggaagaaaaacgtgcgtcctgaggattaatatgacctcgatcaacaatttgtgtgatataggacgagttcagacgatggtccgagacaatgaaggcagacaagctccctctaccttcgagatcttcacttcaaaagaagaagaaagattgggaagaaattcgatcgagaaagttgacggatgtacgctttcagtttcttgacctttttatttcggtttccttggtagctttggttctctatgctgacagaacggcgtccttcttttcggtttcgttaggccgatatcaccgccatggtcaacaagaagaagaactcccaaggccgactgaagttgaaccaagcaaatttgaatttgaatcgacgcagagcagaacacacgatggcgatcaagcgacaagactacgaggcggccgaagaaatcgctctcgctattgccgctctccaagaggaggtcgcctccttgacgacgaacggtgattctttctctgcaggtggttacaacggtactgcttccggtggagagggtggagggctcatgggaaaggaggaagatctgatggccaaactgaatgagaagaacagaaagagtcaacaggatgcgatcaggaaggcagacgcggacagaagagaacaaagacgggctgccgccttgttgaagagtggaaacaaatcgttgttgtctcagtttagttcctctatttcttttcgaaacctctcgctccctatatctaaggtcaagaaggatttttattcacccgtttgctatgtttctcataggtcaaactctggaacgagcaccccgacagtcaggactttggacccaaaagacaagtgggggatcaaggagattgttctcacgcttgaactcgatctcggagaaggtttttgatcaggcttttttatgtttggttttttccaagaagagagaaagtcatgctattcattttcctttctgtttcctttctgtaaaagggggtgagggagagtttgtacagttattcatgatcttgtccttaacctcagaatgtctggaattacctgttatccttcatgagtatgtaagaacaagacgaggtgtaaggatttccattggcattaaggtatatacgagtattaaaaaaccagccggtttaagcagagtgataatgcattagggatgtcttcaataaggaaaggtagtctgagtagagacaagaaagaaggggcattcaaagagctgtgagattgatggggaggagaaagaagaatgccatgagaacattgcgaaaattgaatctagggcgtagcggtggtagtgttattggtagtagccggtgcgcccaagggtacactcataggagcgactggaccaggttgggccgttccattcgccttctttaaatccagttcctttcgttcggcatcatcgaaatcatcgtcgttcgcaccaccgaaggattgaggacagcaccctgcttgtttctttgtggtgttttctccggttttacctagaaaggtcgcgtcgagaaagaggtcaggtacaacatgcaagcaggatttagggaggttggttaatgagaagggcacatacagatgttgcaccagttttgtagagatacaatgaagcatgttcctgtgaatccatcaaccgataccgaatcttactctcagtctagatttcctcggggaatcctgccactatgtctgctctcgacttgagagaagagggaatgaacggaccgatggctccacagcaaacagccacgcatccttgatcatcagccatgtttttggtcttgagagtatagtttggaagtgtgagttcgttagaagagtccgggaataagagcttgtagttgaagttgaggttggtggacgaggtcgttattatatttgaggattaatgatggcggtgtaagttacgaggtttcaatcaatcaacgttttcgttcaaccggcactgcctgttggccccgatcgctcttccaaaacagttgaacgcctctcggagcatcttgattattctcttcggggctttagaaccgaaccgaatcgatcactcgccatcattatatatatatcctttcttttgagataacctgtacacctgatgtacacagacacatatactctttgtcgctttctctcggtttgcaaggctgtaacgagggtacatgacgtcacgcaagcaaggaaagaatagtactcaatacggatacatcaccatgcatattcttctatttagccggctttatgtttccctaaagacaaggagagagatgcacagagaggtggaaacggcattttgagagagaaagaaaaaggaaagagatcgcaggtatatcctatgcttggacacgaagagatgcaaacacaacctatctaatcacaaacatgcgtatcctgttttcaaacagaccacaagtgcgcaaacccgaaacagcctcatcagtttcatcgccccctttgctacatatcatgagaagagtaactaagaaaagaaataaacgatctcacctccgtcaaccaagacatcggaaccggtcatgaacataaagttatcactgcacatcgccaccacggattttccgatgtcctgagcggtcgccatcctatttcccgtcgaaggcccaaatcaaacgagaagaaacaaccagggaaacaaacaatataaagatgtttgaacatcagttatgtgtgttgtttgaatccgtcgttcgtgaaagggggcaggataaaggatcatgcacgtacctgccgagtggggttcggtagacccattcatccacccaagtcttgtcgacagttgcaagctgaaacagagaggaagagaggagaagaaggaacagatatgcaagaagacggaaagtttagtttcagtagaagaaattgataaaccacaaatggaaaacttgaagttttgatagggacaagattcataccatgtccgtagcaacatatctgagcaacagacaagacaaaataagtgtccgggcgagagagagaagtcgatgaaaatcagttataagattcagtagttcattgagcaagtatatcaagggacattaagtctcttacccgggagagatgcagttgattcggaaccctaacggcgcccattcgatagccaaggactggagagaactccatccatcaaagtaagatgtgttagttctcctttgcttcgatctgaccgtcggttcaggaccagcgcaccttagagaaagccgtcacggcagcctctgaaaaagggaataagaacaagatataggttgggaaagaccaggaaggtaagtgcataaactaccaccaagataaacctgatcgagaaatttgacgtactagaagcattataagcggcttgcctatagagtatcatttccatcgagaaggaatatcaagagaggcaaagcggttcgttcattcagagagaagagaacacacatacgagagaaaaccgatcgaaaaaagatcactcacttttgaggggacatggcaacatggccactaacactagaaacaaccaaaccgacctttccttccaggcttcctttcgtcttttcctctccggcaggaagccaggtgttgacacattcccgcatcagataatacggtccgaacgtgttgactcctattgttgtccccgacaaagcgatgatcacccg

SEQ ID NO: 3093 - DNA, 12730 bp, Xanthophyllomyces dendrorhous
  misc_feature (11658)..(11778): n is a, c, g, or t
atgatcacccgggttaaccaaacaatttctcgtctgtctctccccaaagattacaaagaagcaagaatcagctgctaaaaagaacggaactcgccaaagatgttcaacatctcgtcgtctgtcatgttttctgcctccttccatagcgcaattcctgcgtttgcgactacgatgtccaaacttccttccagtccggattgaaggattgcaggcagaagagcctgataggatttcgattctgaaccgttcagttgaaaagctttgaattgacgatctgggaactctgattgaagatcttgaagcagagcatccacctccgatttcggagtcgaaccatatgtcaatgcgatgtttgctccagctaaagttgcgttcatccagccaaagcggccccatcgagatcgaagatgatagtgaaaatcggtgactgaggacgatataagactgagaagacaaacctgtggccatctccttgacgatggcaagccctattcctcggtttccacctatagaatgataaccatcaatagattttcagcctactgtgagttctactttcctctgaaactttccaaccttgattccgagagaataccaggcaagacgaggcaaagacgagggctgtaggacgaaccggtaattaaagcaatttttccagaataatcgatagtagcaggcatgtcagtcaagtctcgaagatgtagagaaagatgggttgaagaatgagtgggtgcaagatggtgtgaatgagagaaagtataaaacagacaaaaactcaagagatggacgaaacagatctccggagataactcgtccggaaaggcaagatctccggcccggcgttcgccggaagcgactaggctttgttatacatcttcttcctttagagtttttcctttggtcttttccatgcgatatgttcaggactcatagatcgacaagagataaagaggcaagaagaaggaagggtgagagaaagagaaagtagaagagagttaaggcgaggtggaaggtggaaggtggtgtagtagtggagaggaggggagggtgattggagttgagctgagctgaactatgtagattggagttggattggactggattggagagtggatagaagggaaaaggagcagattccgaaagagcccaagaaggacgaaagcatagagagatgaagaggtaataaagaacaggaaggatagaagacactggagcaaagccaaaggttccgaggtttgtacgattttttttggtagagaaagtcattgtttatgataatttttttgggttttgtatggaattatgtcaaggaacgaatagagtaagaatggactcgaagacagatagaatttttcgaaagagaagaaacacatagcagcgaaagaaagtaaaaaggagcagagggacaagaaaagaaaagaatataaacaaaagacgacagacccgacaggtcactcaatcatcgtcttcatcatcaccgaaagcttcccgcatccctcgagcgccttcctcctcttctctagcggtcatctcccgggcggactgctcgaatcgttcgatcattcccgtccactcaccagaggcaagttcggggaatcgaccaatggcggctcgggcaaaggccaacaatctctcgttttctccttccaacacttccaccttgttctctaacgtcttgacatgctcaagctttcggatcctcgatcgcctggcagcgagcgtgttctgtcgtcgtttgaactcgatcgagtttgccaggttttccgggagtggctcgtcctcaccgggtatcgacatcaaggaaagcacgggggtggaagaggtagaggcggaggaagcgtcaggagtcgcatcagtcgagaccctctttttcttattaccgcttttgccagcttgtcgtgcttcaaaggcagcaggaattcttcttttgctcgtcgcactcggtccggcgtaggttctctcttggataggtgcgtccaagtcgagaagctggtcggcctgtatgccttttcggtgtccagtaggggcagatgatcggcgaggcgcaggtcgaggagcagcagaaatagtacgggaggggaaaggcgaagagttctgtcggacaaggccaagaggaggggtctgggagggagcgtgagtagagggaagagggggcgagcaggcctcaggagagatcgtcaaggacggtggaagaacggaaggaagggacaaggacggagagggatgaggggtagaagtagcgacagtagcgacaacaggggctgcaggagcggcaggggtgacggaagcaacagcgttcgaggtggatgactttgaagttgggaacagggggagatcaccaaacagggaaggtccgtcaaagatgaaatcaaagttatcatcattgaaggagctgtagagatcaacaagtttgaaaagatgttagcggggtagtcagtttcaagacgtcaacaaacggaaagtacgtacagcgcgacgtcatcgataccagcctgtgcacccgaatctccaaacaaactagcactcgcccactcgggggaagcagtaaagttggaaagaggggaatagtcaaggttgggcgtaggcgagccgggagcgagagggatctgatcaaagagattgccaagaatgtcgagagagacggaagggtcgaaaggagcggtggaggctggtgtttgttacagaggaaggaaaaggaaagaggaagtggaagacaaaggggatcagaacaaaaccatggacagacacgaaaaggtcgaaagatatacacacctgaacctccgaccatatcttgaaagccagactcgttcagaaggggactggtctgaccggtctgacaactctgttcgccttgctgatgggccggctgagaaaaggcgccaaagccaaaggccttgttttgtagaagagccatatcgtcaaaagtgtgatgtgggggtttgttagaaagataggagaaagaagagaagttgtcgggggaatcgacggtgatgacgggcacggtagcaggggctatggaccggttgggaaggggaggaagttcggattgatgcgtgcgttgtgggcgcaggacagtgtggacggggttggttgaggaatcttgtgtggacaagacggcgggtgctgttttcgtttgttctggtttttttcgaattggtataggcggaagacgggtagggagacctaaggagatgttgttggcattttgtcagtaaggaagtgaggtcgaaaaagaagatgtatagatagacagccgaaagaactcaccatttttgtggaggatggaaactaggttagtttggtggccgaagccgggtggtagaggtgttacgggcctattgatagagaagaataggcggaacgagatcgaggcaaggcaaagacaaccaaaccgaccaaggaaagcaaagcaaaagacaagaaggttaacaaacaagatcagataagaatgttctgggtggatttgaagaattgagatctgcgggcgcctcggttctaatttctctctagtcgaatttaatgcacgcgcagtgattcctcggaattacttccgatacaagggtttgaccgaatatgcgcagcagattaccggagttcggtggtagggaagagaaggcgaatccccgaagcaagaccggatggaatatggacgatggaagaacacttacgcatgttgggtggggagacaaaagtcaaaacctgtactggatgtacgggaaaagtagcttgagggggggacactaaaggatgagagagaaacgcatgaaaagattagtcagaaagaaaatccgcgtggtacgggagtaatagattacgaaagtgataggaatagaaaggaaaaaagtggccacgaccaattcttcctgtcaactttttttctatcctctcttctctccttctcaaaaacgcttttgttcggagctagaaaagaaagagagaagaaagaagaaagaaagggaaaaaaaagaaggaagaggacgcgagaaggaagagaagaaaacacctactggttatttaaactgagtgaaattgggggcggttctcggggaaagaactggttgcttaggcgaagaaggacattataaccgtatttctgttcgtgttgttgtgtatcagatgggatttggagaactggtctctgggttcagcagggcaaagataggtgccctgagggagtgtgttgaggatttggaagagaaagaggaggaaagataaacttgacggaaacaaactgaaggtgatggacgaaagagaaagaggaagggagagatgagaggaagaaaagacgagggcgagaaaaaagaggaaatcaacgaaaaagggacagtatcaggacaggaaagaggggaaaacgccagagattgccaatcagaaacggataactctactgcgcgctgaaaactatgcagatccagcctcggccttggctgtctttaccccgaggaagggctgatgaagggcaaacatggttacattcgggcttcacttgggaacaatctggggcagacagctatgcaacttgggatcactcacagtctcgttcacgtgtttcccttgaggtcatcgggacaccaaaaaaatgccccgaccctacccatgatatggacaaatcggggtcagctgtgcaaaaacttatgtaaatagattatcttttatttcatctttcgtttattttatttcatttcgtccttactcgacttaccgcctggtccgcggaccgcctggtccgcggaccgcctgtgggtatatgtgtgatgtgtcctccggtctctcgtgtccgtagagttcttttcttcttctctcatctctttctctctgcccaccatctacattaaatcctcccttcctactttccaatcatgtctgctagcacactcccaaagcttaccgcccggacggtgaggaacgcttgcaagcttctgaagagccctccgaccatcagggtcgtcgcttgtcctttcaggtcagtcctttcgattttcgtgtcatgacatctttcagtccagttctcacaaagccatgttcccttttttttctctccatcttgcctcgttgcttgtcaatcgttcatcactcaattgattatttggctcatattcagtggtggtcaggttcgttgtctcttcgtccttttacacttgataacatatttgaagcccaaatgtttgcgttcgaccctctctgatcacttttttttgtttggttttaaacccttcagcccaggccaggaacagatatcgctccttcgaccctcctctcggctgggttgatccctcaactcgaggctctccactggaaagtcaacttccagaagccgttgcctgaatcttttctcgcgttgaacccaaaggatgatccgccgattggcaggatgcagaacccgcgcagtgtcagcaaggtctgcaaagaggtcagcaaacaagtcagcgaggcttgcaaggctggtgaattgccattgactcttggtggagaccacagtctggtaagcgtttcttggtttccgttctctgttacatgactttgtctcttttggctgatgcttcttgatgtgtgacactatataggcaatgggaacgattgctggaactatgaggtgcgcaactttgtgctcatccagttcatctctgtatgtcttagcttgggccactaatatggatattggttctctcgacgttcttattctcgccgtccgaacagcaagtaccctaacgcctgtgtcgtctgggtatgttctctctccttcctctgctttctccttattttttctttttctatccctcaccaagcttactgcatatacctctcaggttgacgcacacgccgacattaacactcctaactcgacagagtccggtaaccttcacggatgccctgtttccttcctgtgtgtatctctatttctctcttgcgtggtcctcgaaagcaaaaaaagtctctttcgctcacaacagagaacccccgtccgcctctgtatagacttggtttgaagggagcaaaggatctcgctcccttctctgaatggctttcgccgtgcttggacgcaaagtccattgtctacattggccgtctgtcccttccactcttccctgctttctcaataaacacctctggttgacatccttcatgattatctctcctacgtagtccgagatgttgatcctgccgagaaggctatcctccgagagaacaacatcaaggcattcagtatgcacgatgtcgataagcacggaattggcaaagttgtcgagatggcattggaaactgtgaaccccaacggagaccgaccgatccacttgacctacgacgtcgacgccttggatgtttgttcaatctattgtctcgctgtgtctcttttcatttcagtaggacctggctgattccttgttcgtccatctatgacagcccgcggtggctccttcgaccggaaccccggtccgaggaggtctttccttcagagaaggccactacattgtcgaggccattgccgagaccggtatgctcgtcgcgtcagtcttttccgctctctctttcccctcttgtcgcctgtcaaggaggttgacttggactaatgcctcatcctgcttgattctttgttacagtttggatatcatggttcgtcgttgggtcttgtctcgaagacggcttcgattttgaacgtacacgctgacttttcctcctgtctgtcttccttctttcccatgatcctacgatcttatacaacaggaggtgaacccttctttgcgagatgagctttcggtccagcagacggtagccgtcggatgctcccttgctcgatctgctcttggtgcgctctttttcagcctttttgttttttttttttgtttcatctgattctactttcgctgatgcacttgcgcgtatggcctgtactgatacgctctttcgactttgttttacaggcgagaccttgctctagaggaacaaaaagaactgaaaccatacgggtctcagcttgtggaagcagaaggaatagaaagaagaatgataataagaagcaaagagataaaaacgatgaaggtggagaaaagatatgaggtacgacgggatcactggagatagatctcgtgtcgtcttggttgatacccaggatatatatatgaacatttcatcttctctgtttcactctcgtttgtctctacttggattctttgtgcatcatcgtcaccatgaagcgagattgagaatcggtctggccgtctgaatgatgtctttatttggttgagccattcaagattgatctttgcatgaatttatatactaatcgttttaatttttatatcggcttgagtcaaagtccccctactcgttgatctttgcgaggatgtcagagtccttgaagaggaagtactcctgtagttttcgcggccaaaggaggagaaaatagaaggctcgttagtttgttttacattcatggtttccatcgttgcaactgactacatcacacacgcgcaccagccgattctccggaaaaagagaagaggcaaacacagagacaaggaaaagaaaaagagaaagaaagagaaaaacgagaaagaacgaacctcctcgccgagcttaatggagtttcctccccatccaggaaggagcactcgatcaccggcctggacggcgcagggctggacgacgccctcctgtgttgttgcacaagcgcagaaggtgcgagatagatagcagggcatgtatgtgtgtcagtatgataacgaaagaaaagaacggatatctgtagatcgtgagaggaggatatagcgagtggggaaaaaggaggaacgaacggcgttgggagctccgggtccgacggcaatgacggtagcctccggcaacgggttggccgtcacggacgagggcaaaaagattcccgacgcggttttctattttaaggaaagagtgtcgttaccggaaatggaaacatgacattattatcagcaagaaacacgtcgaaacaaggcttaagaagagaaggaggggaaggaaaggaaggaggaaaaaaattgggaacgtacggtctccggcttgaatcgctggacgaggacccgatcgaagagagggacgagggacttgatgtttttgaatgtagcagactgtgtatttataaaatgacagatagtggttagccaaggatctaacacgaatacagattgctcttaaaaagacatgagaacataccatgatgagtgatcaactggactgatggtagatggaggttagggaaagaaagaacagactaggaaataagaaaaagcgaactacaaaaaagttgcgattttcaatacggttgtttttttggaaatttctagaaaatccttttttctttttctttttcttttccgcacatcgtctttctcttcatcaccacccatccatccatccacccaacgattcactcacagatgaacagactttcagctatcaccagggctcttcctaggtcctccaagccggttctctccagagcttatgcttcccacaaggagatcaagttctctaacgatggccgagccgctatgctccgaggagtcgacatcctcgccaacgccgtcagcgtcactttgggccccaaaggtgggttcttggggttccctcttctttggtttctgcttcttgttttggttgtcgatgtacgattctggtcgcacttctgatgcgtcttgatctttatcttttgtcgagacaggccgaaatgtgatcatcgagcagccttacggtgctcccaagatcaccaagggtaagctcgcttttcagctttcgatcggactctcagcttgttcgcttatgcttcccatcatctgctttccttagatggtgtcactgtcgccaaggctatcgtcctccaggacaagttcgagaacctcggtgctcggtgagtaaagtccttctttcttgctttctcttctcgcgtcttttttcgaaacagattctgtagagacggacgtccgcaagtatatctatgagcaagtttctgatcggcttgtctttcttcactttgcggtatcgcctctgcgttcaaccgacagactcgtccaggacgtcgctagcaagaccaacgaggtcgccggagacggaaccaccaccgccaccgtgctcgcccgggcaatctatgccgaggatgtcaagaccgttgctgccggtaagtctaatttcggttttacgcccaagggaaaagacagaaggaaaagccacccacaaaagcttacactgactgtttggccgaacttctgttgttgttgttgttttccgtattaatcgtaggttgcaaccctatggatctccgacgaggttcccagcgagctgtcgagcgggttcttgaggtcttggaggccaacaagcgagtcattactaccagcgctgagatcgcccaggtgagtttttttttttttgtgtaaacaaaatgctcggattttcggcgaaaaactaagatcttaactctgtggttgctcttctccttccctccccatatcaaggtcgccaccatctctgccaacggagatacccacatcgggaacttgatcgccaacgcgatggagaaggtcggtagggaaggagtcatcaccgtcaaggagggaaagaccatcgacgacacggtaagttgattccggctctgctgcaaaacgcgtttgatccagacgaaacgaaatggaagatgtgaaactaacgcgcgcgcgcgcgcgctcgctctctcgcgttttcttttgccatttgctttcttttcttctcttttcttttctttttctttgatggaaacgggttaatctttgaaaggtcgagatctccgagggcatgcgattcgatcgaggatacatctcaccttactttatcaccgacctcaaggctcagaaggtcgagttcgagaagccgttgatccttctgtctgagaagaagatctctgttctccaggacctgctccctacgctcgagtacgccgcccaggcgagacgaccgttgttgatcatcgcggaggacgtcgatcaggaggctctggccgcgttggtgctcaacaagctccggggtcagctcctggtggccgctgtgaaggcgcccgggttcggtgacaaccgaaagtcgatcctcggtgatctcgccatcctgacgggtggggtggtgttcaacgacgagatcgacgtcaagctcgagcgcgcccagccggaccatctcggttcggccggctcggtcacgatcaccaaggacgacaccttgctcctccacggatcgggtgacaaggcgaacgtcgacgcccgaaccgagcagctcaggaacctgatcgccgatgggtcgacctcggattacgaccgaagcaagctccaggagcggctcgccaagttgtcgggcggggtggccgtcatccgggtcggtggctcgtccgaggtcgaggtgggtgagaagaaggacaggtacgacgacgcgttgaacgccactcgggcggccgtcgaggagggtatcctcccgggtggagggacggcgttgctcaaggcgtcgctcgcgttggacgacgtcaagtttgacaactttgatcagtccctcgggatctcgatgatccgaaaggcgatcgtccgaccgtgcaagcagatcgtcgataacgccggtgaggagggttccgtcgtggtcggccggctgttggaaaagtacggccaggagttccagatgggttacgatgcctcggtgggagagtacgtcgacatgatcgagaagggtattctcgatcctctcaaggtcgtccgaaccgccttggttgatgccagcgggtgggtgtcttttcttttattttcgtctgcccttgttttctccccttttggaccgaatcggaactaacggacgtggccttgtcttctctctctctctctctctctctgtctacatttgacactcaagagtcgcaagtctgctgacgacatccgaagcgtgcatcgtcgacgcaccggaggagaagaccggaccttcccctgccggagggatgggcggtatgggaggaatgggaggcatgggtggtggattctaagaagaagaagaagaagacgaagaagaagaagaagacgaagaagaagaagaaaaacgcttttcacgttgtctcgtgtgtgtgtgtgtgtgtgtgcacacgcgcatgtgaaaaaggtggaggtggcaagagaaggaagagaaaaacaaaacaaaaaaacaaagctcaactcatcaaatgtttcttacagatctcatcattctcgccgtcgattcgagaacgtccagagctggcagtgcaaaggagagtctcccgttggcaagtgacaagaaaagaaacgagcaaagcgacaaagacaacgttcaccttttgcgccttccttccttcctttttttttctttttcttttttcctctttccccctcatggttgaaagcactgcttcgcgtgtgtctgtggttcgctcagagacaagatgagaaagcccgatcggaacgggacgcacagtgaattgtcaacataagtatctgttctccgttcacctagagcgagaatatggtatcgaataatcgaataccgaatacaaacaacaacaagagggaagagagagaagagagggaagagaaagagagaaagagagaaagagagaaagagagaaagagagaaagagagaaagagagaaagagagaaagagaaaaggggggggggggnnnnnnnnnnnnnnnnnnnnnnnnnnnnnnnnnnnnnnnnnnnnnnnnnnnnnnnnnnnnnnnnnnnnnnnnnnnnnnnnnnnnnnnnnnnnnnnnnnnnnnnnnnnnnnnnnnnnnnnnnaaggaaaagtattgaggaaaaatttgggaaattgagaaaaatgagaaaatgagagagttgactgatgtatccgagagtgggacagaccgggaaggcgtgaatggattctatagagaagaaatgaagaggctaggccgatggagtgaaatttcaatgagaaaagatgaaagtgaagagtgaaaggtaaaagatgaaataagatagagataaataaagtgtgaggaaaatataacaagcgagggatcaggatcggatcagagttgaatcggaagacgtcacgagaagataaggagacacaagagaatggcaaagacaaagaaagtctaatgataaatagtgtttcaaagggatgaactttgggcagtgagaaggatgatgagagcacatggaacggagaggacagacaacttggaaaagggaggagagagagagagagagaagaaagagaaaatatgcttgaaagaaagaaaccgaaagggaggggcgggcgagccgacgaaacgggaacgggatcggaaacagaaacataccaacccaccgactaaaaagcaaagggaaaacactatcaactcaaactgctccgtaggcgtattcgccttgatcgtggttggtatgctcgccttcatagccccagatgacctgtgtgaattgatctggttcctgtcctcctcctcctcctcctcctgccggctgctgctgctgttgctgctgccgaggagaaggatggaaggatgaatcggcccaaccggcaccgttggctttggccaggtcgaacgacggtggtcctccagggtagacatgatggtctcttctgaaggaggcgtttgttaacctggacgaggtcggttccccggtggacggcctgcctaacgggtgtccttggaagccgtcagaaccggccgatgtggaggggccgctgatgggctggtggaaccctgttcctgatgatccc

SEQ ID NO: 3094 - DNA, 1117 bp, Xanthophyllomyces dendrorhous
gcctaggcacacaggcacacccacacactcagaacaatacaaaaacgccacgtcttccttcttcttcctcgtgcgttggccgcgccagaccaaccttctaatgaaagcacgtgagtccagaaattcggtcaacttcccgacgatcttccgctttccgccttccgccctccgcctgttgccggcggagagcgtatcgaggtgattgcatgtctttcaattaaatcattatcgtcgtcatcatccgctcgcaccgcacacaccgcccacacccacgcccacgcggctctcgtttccaccgagagaacccacataggcacatgtcgatcgattggtaatcggccgccgaggtcttgaaccttaatccccgttcgacctcttccgcctcctcaatgaaccctctccgagacttggcgaaccgtcaggtcccagccgaagcattccagggcaatcagatccctgctgcgctctccaccgcaggcgataaggccctcctggtcaccggatggaccttttgtgtgcgtcgccagctgcgcgtatggatgtactttatgctcgtgccttcggacgtaaccatgggcataaccatgatcaccacgttaaccctccctcttaaccctaaccgacctccaaggcctttcccccccacacgtcatcatctctcgtcgcctccttctttttcctcaccgcccgttcgacaacatccggctcgcctcaacctcacgctgtatccatcatctaaccatcctctgcccactctctactctaatctctccagccaccctcaagatgtccgtgttctctgggaacccaacacagcccaccaccgcggagcagagacagttcgaactaaaccagatgattctcatcagagaggctgccatcgatggtaacctcggtttcttgtttggcctccttctctttccatccatgctcaccccttggctttgtccctcatctccacaggaatccagatcttctcggtagcatctccagtgatctatctgctcaactcgacgcgcacaaagatgttttccgtaaacggtctcctcagagcgtgtcagtccgtttttgttctttttttatatctttttttttttttaattttaattttaatttt

SEQ ID NO: 3095 - DNA, 3164 bp, Xanthophyllomyces dendrorhous
  misc_feature (1020)..(1029): n is a, c, g, or t
ccctcctccctcctcccccctctccgttcatgtttcgtcacactccagccgctataggagtcgcagacgtcggtccgtccgtaggagcctgtcttgccgccttgcaactgaactttgtaaagacaaaggaagaagtcaactctagagtgctcgccctcaagtccgacgtcagtgcctttagccttgtcatctcgacaccaccttctctcttcgccctttgactgacaaacatctctcggataaaacatccaccaacagtttggaaaaactcagatggacgactacactctcatcggcggcgtcgtaggttcactcttcaccaccgtacgttccctctttttgcctttgctctagtgtgtatcctgcggatgaagcgtctgaaaaaacgtatacatctgtctatctctctctgtctctctttctttctatcacccacatccacacccaaaggcctttgcgttgaaaagggcgagattaccctgggcactcgtcggtggtggtggactgggtatcgccggtggactcgtcgcgtcagtatctcttccgtagcccttttctcctccccctctctctctcatatgtgccacccaatcatctcaccctgattctcactctcactctcacgcccacactctcaccctcgaccatccaccaaaatagacactacatcacagaattccaaaagacaagtaccgccccgacagtgtccccgtcggcgtcctctccatcctcctcctcctctcctgtcacgactccgagagtgtgaactgtctttcctggctctttctgccttttctccggaacaaactataagtatgatcgaataaacatatatatacatacgagacctccaacccgatggtccgggagaggaaaattggatttcgtcaaaacggctggagaggaggaggaggagatagagagaatggaagaaaggaaagaaagaagaaacctagatcgggtattcagatcgcaaaggacatggaaagtaaaaaaaaaaaagaagaagaagaagaagannnnnnnnnntgcaatacaagatacacagaggaggccaaggagaaagtcgaacggaagcgcgcaaagaggaggataggaaacaaagataacgtaatgtgaactcgaacacggtgtagacctcaccattcctcctcctcttcttcttcttcttcttcttcttcttcttcttcttcttcttcttcttcttcttcttcttcttcctcctcttcttcctccaaaagattgtgtaaaggctgtccgtgaacgtacgagctgataccccgaaaatcaagatacacccacacaaagacgaaaaacaaaacaaaacaaaacatgaggtgatcagatcatcgttcattctcattctcagacactctctcactcgactgggctgagcctaaacccacctgacaggaacgaacagatccctcagcactcggatgattcgctcatccccgttcgaccaggatcttgcgccatccgtcgttcgtctctctcccgatggttcctcccggggcctcgtcgggcggaccacctcgcccagatacatagacacccccacggccaagggcatcacctcggccacaacaggcctctgaagcggaacgacctcctggcgcccgccacctccggacgcctggccagaacgcaccaagagtggcgcgcccaatggggccagatcgttcctggcctcgtccagatcgcaagcagggtcggtcgtcaggcggtgactctccgcccggacgtcgggtcgcggaaagattcggagtggttcgacaccagctttcgttcgctcatcctcgcctctacgaccacgaccaccaccatcaccaccatcaccaccactctcacccacccggaggagttctttttgcgcggatcccgttcccgatcggaccatgccggtcgtatcaatcgaccgtccggtcggaccgaccgatacgctctctccagactcggtcgtcactcggaccacaggcgtaagagaataaacggatccaacaagcttcggtccaggttccgggggttcactaaggtcacgcacgatcggtcgcgcaatacccgtacaagattcggccggggatctgaccgggtttgttgtgtcttttgtttctaatttttttttgggtcgtcaaccattttaatcatgaggtattaatcgtcattttttttgaattcaattcaatcccatcccggagcatcagtcaaatggtcagccttcgttacttttcccacaaagaaaaacaaggaaaatcaagacgggatagatagcaaaaagagagagagagactttttttttcggacgaacctctgaactcttgcatatatcggtcgattctatctctcacgaccgcttctctagtcatcgccgccgccctcgtctttctcggagcgtcatcatccttctcgtccttctcgtcctttccaggatttcctgtaacgccctgattcgacttcacgagacccttcctgatgttgacaagactcggttccgatctcgagccgtgaacccctctcggtcttattcccggctccggcctcaactccgaccgatcgattgcggtagaagaatgcgaccggggaagattcgtccggtcgtccagatgggtagagtacgatctgtgaaacaccaggtgttgtcgagtcgaccgatcctgccagactgccgggtcactcttctcatctcgtcctagttctcgatttggttctggttctggttctggttctcgttctcgttctcgttctcgctctcgctcccgacgaatccgaaccggatccttgcctgcccttttctgtttcgatcgtctagggttgaacaagttaaagttgatctgcttcctcggaggtggagcgacaagctgacgttgatactcgattgggacctacaccaacggcgaacaagaaagtgttttccaccggtcacacatcgtttagtcatcacgatcaccatcctctcgacgacccaacgcaagaacaaccagagatgcgctcacgatctcctcaaacacgacatacaacgtgtccggtttggtcgggccctcctttcggctgatcgtcttgtactgaacctgattatccagataacatgccgagtaatgaataaggcttttcgtcagatcttgttccctggatgaacacctaccaaaaaaaaagaaaagaaaaag

SEQ ID NO: 3096 - DNA, 11130 bp, Xanthophyllomyces dendrorhous
agaaagaaagaaagaaagaaagaaagaggaaatctattcacgatggcccagttgcactccctcgccgttgggtccacccggttcatccagcctgcgctaaacaaaagatctgcccaggcatcgacaaacgcttcttccatcgtcaccggttcacacacccgtggtcttcaaggcaaaataaaaattaaaaaaagaaagaaggaggaaagaccctcggtcagtggataccaaactctagaacctaagcctaaatccgactgaccggacatcatagtcaaacgcaggaaggttcttttgcgagctcttcaaacgttggtagacctgctctcgatctaagatttcaaaaagagtaaaagcatatgtatcagcccatcaatcacaactcccaaccgagttgacgcaagagaaagagatgccgaaaaagagaaagagtctgcctcgtacgttctggccagttggtgatctctttctggatgggcagaaacaggttcagcggatcggacagcgtgattccagagtctgggaatccagtgttagaaaaatcgttccacgtgatcgatgctcttttctcagccattttcgcctacattctcgatatgacaagccaaggagagagagagatcgagatcagttgagcgctgttcaggaagagaaagacaaaaaaaaagaaaaggaaagaaaaggaagacgaagagaggaaacaaaagagaaagccagagattgctcacagctctagaactctccgtcagatcaaattgcagctttccgctgaccggatcctccggtttattcagatcaagcgatcgttcatggttctccccgataaagtcaaacccatcttgagcaaagaacccccacttcttctctgccaacgtctcccacccagctcctccttcgtccttgtcccatccgtcgtcgtcgtcatcatcatccgcctcgccagccgcaagcgcgcagagagacccatgggatccaacccggtacgacggaagcgtagtgttcgggatgttcaacctttttctgtagtccgaagcaaagcggggacctctgttggaagcgaccgagcctgcttttgtctttacaggggccaccacgtctctcacccacgcaccacagacctcgtacccgtccgacgctctctccaactcgccaacccaggactctgccgtacggaagagctctaccgaatatgctcggacatctttccggaccagctctgaacgcacagatcgtccgtcctttcgaggatcaccagaaagccagacttggtcggaaacgatcgtcgccggatagttcttcgcccagctctgcagtcggggaggcagaggcaagttcttctggagggaagcaaaggattgggatcggatgaacgagagcaggagatgctcggtggcgagcgcggacttgacaaaatgtttctgagtgtcaacgagtgtcaaggtgaccggaagaccaaagaccagaggcctgagcgggtcgtagtaaacaacagagttcatcagcttggtaaacctatagatcgagcaaaagacattcaacctacccaaatagtcctccgataacgggaggtgtctgattgatagaaggaagggattgagtggttcgcactgctgctttgaaacgttcgacaagcgaagatgtactcacgcatccactcaaatgactatgtgccacaagcttggagaataaagtaagaagatcgacaaaaattggttgaacgagcgttccgagcttggcggcaaacgcaaaaatatgggtctgaggatgatcggcggctggaaaatgaatgtgcaaccaacagaaatgcacatcagcgggcagtgctcgataatgaaactgccgaaagagcttgacaccacaagaaaagaagaaggaaagaaagaaagaaggagaagcacacttacctctctcgctcttcctccactcggcatattggtccaaatcggccaaccccctcttttcctcatttcgttctcgaatctgtaagactctagcgagggcccatcggaggacccaggcgagttctcgctcacccgaaagcgaaatctcccgggcccaagtatcctcctgaggagtaggccgcggaatggtccagtcaaaagcggactgcacagaggcaacatacgtccggacaagggatttgattttctgacacgacagattcaccgcaagcgaggaaaataagagaggtgtttcaagaccttgtgtgattgcggtaggaggttgacgagcaagggctaacaatcagcctacactcttttggcgagggagggaaacagtgaatggtaagcaacacaaaagacggacctctcttagaaagttctgcgcagatggtctgcacgagaatacctagatcttccaggcccagtatctaagaaggcgaaacaagcaaagaaaaaatagagcaacaacttcgaggataagcctagattcccagagcaacgaaaccgacggaggaacccgaacgcaccacatcatttcgctcgctcataagaccccacttgatggttttccggccggtatcaaccaagggaatcgacgtgctggcaaatctccattctagttccgacgcttcatccaggtccgttggtctagcatcaaaagttgatggttttttagtttccgaccccggaggagataacggaagggctgttgagtttggtccgccggtgagacgacgacgagaaggtggagaaggtgtcgccggtatcgtttgtctgcctcttgtcttcctggagaggagaagagcttgatccgactcacttgagttgaagcttccagcttgagaagacttcccgctcaaactggatttctcatcagatgagttaccaccagcaccaccagcaccaccgacaacccctcgacggcctttgtaggacctcgactgttttcttctatttggagagagcgtgaacaaggacagcatcggatcagatattggcaagatgtatgcaagatatatatatatatatgtatatatgtatatggatatgggaatgtggtacaacgatcaagtcaaagagcacaacgccctctctcaaagacaagcatgcaaacaaagagcaagactcttataaaagggatctggaggaggaaagaaatccatggcgactcaagataacataaccaggacggatcaagcataaagtcgagaacgtgcccctttttttccacccaggacccccttttttcccattaatggtttcatcttcctttcagccatctttcatcagtcttgttaacgtccatcatggcaattgaattcaaacaaccacacccacactcacactcacatatacgagacaagacattggatagaaccaataaatgattagacatgaaaagacaaaagataaaacagatacgataaactaagatagaaaattcaagattcagaatctatgacccaagcgtcgcgtagagttcgctgatatacacttcctccctctccctccttcaaggcctatatggtgtgaccatcataggcagctgtgctccaaagctttcttctcccttgatcctcggacggacaatcaagctgccagcatcaaaatataaggttatcagcgcatgagccaacggcccaaagatgacatgtaaataagcggaactgacaacgaaagcttctttataaagtttggccgagggtcgcaatgcgcaaacacgaacgatcgtaagagcacaaataaaacagctttgatcctgagttttcccgaaaacgcacacagaaaggacgatcagcatgacattcgactcatccttatcacagtctttgcaaaatgtctagaaactgactctacaagcgcaaatcgatagccactgttcatcccaaaagccgaccagtcaacaatcacatcttcaaaaaaaaaccccgaaaacatctagaacgtacacgcaagatctagggccactgataaaggtagacatatgggtccacacacccggcacttctttcgcggcatcactaaagttctcacccatccacctttcgggtctgaaatcatggtcgagcgtttgaacaatctccacagtcagctgtttgcattcaattgatgttggcagatgaagaagcacacaaacggattctaaaatcgagacaaacctgaagatctgaccatcaccaccccagatgtcgtccaaagtgttcaggttcaagattgctacagataaaaaggcagagaaacattcggcagaaatatcagatccgcccctcggtccgaatcaagggaaccagacttacgaataaatatactcgtccctttcgcgatcggcacctcggtcatcatctttccgttcctcgtgttcttgatcggttccgacagagggagcacatcatccttagatgccactcggagtgtcgatggaataggcgcgtagagccgaagagtctttcggcacacctagtttgagggacaaagagaaggatagatggtcgcctgagatcaaaacagggaacgaaacgcaagacatgtaacggctgcgtgatcatcgatcgggacttacagcatcaagataaggtaatgcgttaagctcatccctttttttttagccacgcgcgtgcgatgtgttgtcttcagcatcgtgtcatttccaacggagctgcaaggaaaataaagacccaaacacttacatcgagggctcatcgttctcaacctggactagctctgctctcagcttgtcttgaatctcagtgttctcgcacatcgcgtacaagcaccatgcgagtgatgtcgccgatgtctcctgtcccgcaagcatctgtcccaaagcaggagagaatgaagaatgattcagtgaggagttcatactctgggtagagtggaaggagacgaacgaaagtagagatctggccgatgacttctttatcatgcaatctctgacttgggggcagatctcgtgccatgtttgaccggactaaggaaaaagaaagaaaaaacccgatcagagagtgaaatccgacatcctttcgatgagctccagaacctcttcaaacaggcacaaagagaagttcgcagggcttactgagcgaactcaagatatccttgcccgaaaaatctttctttccaggctgaacctcggttttttcattttcatctccagcggcctgttctgttcggagggactcgagaacggcctccttcttcttggcaaccaagtctccaccaattcgttccatggtagcaagggcaataccagccgaccgagattgcgcggtaggcttagagaggaattataagtttgagaaaccatgagccacgtgcatctaacttgagttcacaagccgagactgaacaaaacgtacgataaacttcaagaaagggaaaaagttctgaaggacaagcaacaaggtaacatccgaaccgtgaacaaacatcttttggaacgcatccgccagttcattatattcagtcttcagagcattgaaatgatagtcgaagcctagttgatcaagatcgacgggcagtgtcagtacaaacatacgctcacgatcagttgaggaagaccaaaaagaagcgatacagaccagctcttccgataatgtccaatgtagctctaccaatccattccaagacatctattcgggtaggcttgtcatcctcgatcatggataagaacttgtctttgagctgatgaagaaggagaaaccgttgacatttcaaggagttcgttaggcacgattagcgggatataagatcggcacaaaagataccctaagatcaagagatgtacttcataggcatgttcaataaagacaggtgtcatatctcggatataatttcgagaaaatgaagtaacgacgatcttcctctgttgacaaaaatggagattcgaaaccgcggtcgatcagtatagggtctttcctatctaagacaaccatggactaggatagactactaacctgtctttgatgaactccacctagagccattcatcataggcatcagtcaaggtcgttctttgtacaaagatttctcacaaatcctaaaaaggagaagaagacaaaccttcagcggacaaaagacctggaaggatggcaacgcgaacagtatgattgaattcaactttgatgaccaccattggatgaaagaaaggaaaagaaaaaacagacataccagtacccagaatctcttccagaaggactctgaccctggctggtttgggatagtcatatccgttgttgagtacactgaggagcgttcgggatagtccgataggaaacagttgacaacaggacgaagaagatattagaattcaggtaaaagaaataatgaatggagactatgacagactgactagctaaccgcccgaggatcagcagtgtagaaccgttgcatctgaagaaacaaagatgccgtctttgagttttgggcagtatcaatgccaaacgagacagaagcactcacgcccatgaaaccattatatcgcagggtctttccgtatttgagcacaagagcctcatgtccaactccaggttcattgctttgcagacgaatcggaagaacaaatccgaactatgatcaacttccgacaggaaagagcaaggcgtaacacgtcgaaacagaaaaaaaagacagacttcataaggcctttcatgtttccccaaatgtagctctcgatctttggcccgggtaggttcgagtaggacgtcaaggaaggccggatatagaactggaagataaatagagagataaagagaaccggaatagatataaggattgatacccatgagggaatcagagaggctaacagagaaggcatctgtagattgtgtgatgcacacgatctgatgagagaaacagagtatgtcggaaggagaaggataagagaaggtgaaacaatttgtagaagaaagcaacctatgaggcaaaaaggaaatgcgttagattattacatagtttatcttgtattatctcatcactcccggtctctttctctgcagaccgatttaaacattccctctaatcgattcgactctatctgtttgacatatatgaacatattgttgtacagttccgagcatgatcatatcctggcctacagaggagaatcatctcgtcaaccagcttcggcatcacctctcccaccgtattgacgcgtctctgtctcgtctcgatcggtgacgcgtgaaaagggtgtgacgcgtacgacgcgtgtgtcttgcttcttcttcacgagaactccagcaagcttcctaaatctcaatacacgatcaaactcgttctcccctatcgcaacctttcaagccaaacacgattaagctggacctcaaaaatgccgtcaaggccaaagacggtttgtggaaatcctctattcttagaatgggttgaaggtaagctcccttcctttggctggaaggacctcttctccagcaggtgtgtctaaaacagtagtcagctaccttcttcttgttttgttcctgttcttaccaaaataaaaagagatgaggggcgaggcggaagagaagggaatgaagtcggcgagcacttacgccaaggctgctaattcacttagactctgtccgatcaagttcattcacccggcccaatgtgcccagttagtaggcgttggacctacgatcatcgacaggttagtatgatctcacaatgattgttgttcggattattccttgttaacatgctaaaaaaaagcaaatattcaatctctcaacttgctggtgttctgtggacaggctttcaaaaaaattagcagcacactgtaagcaaacggggatatcggagccacctttaccaggtcagtactcttcatctcccaacaggaccaccatcatcagatttcaacctgtacacgaagtcttgttcctcatgctttctaaattctccatacagagggacttcctaagacccgcaagaaagcagtacccttgtcgcaagcccgaagcccacttccagaagacaatcatattgaatttggtttcccaccgtcccaacccatcgcctctggctctggttctcaatcccaattccttccaccatctaagcgtaaagctatgacctccaacatagacggtagcgatgaagacaaggaatcatcatctgagaatggcgaacctgcattccttcgtaaaaaggattcccttcggccatccgcgctcaaagccaaaaaagctaagaagaccgctacaacaaagatgtacgtgcctgcccaaggcactggaccatatgccatccttttagctcttgtgtctcatacgaccgagcaagatcaagacgttccagtaacaaagcaagatatcattgacatcgctacgaggcatagttggtgtctcaagagcttcgtcgtgcctgaacccggaaaacatcataccgcttggaatgggttcgtcttcattcaatcaaatgtgtaatggaacaggcaatcttgcgatgcaggccgaacttctcttttatgtatttctgtcggctgaaaaatggttgttctttggcacggtctaggataaagacgttaatgaaccatgagctgatctacgccagaggtcagccagctaggtggtccctcacagaattaggatagtacgtgctatcagcttctgatttcaatcaaagaagaactttctaactgacagggttgtgttctgaaccactgttgtgaatagtgaactagcttgtcaattgcgcgcatcattggaaggtttcgcaaattcacgagaccgaccggatagagttccttatcacgaacatcagcgtcaagcggacccactcacaagaacagaaccgcctcttcggaatgttatacctccgttcgatacactcagtggatcagtacaacgctctagtgataaatctcggttcgatggggtctctagaactccagtgacgaaccaccagtctacaagcgcaaatgagaagtttggatttcatttccttggtcagtgctctctcgataaaccgtcatcaagattcacgtatcatttcatctaaatatgttgctatacatctgtatccttcttcggcggtagatcgaggaagtaataggattcgtgagattgataaggcccgtatcaaagtcgatgacagtggcgagcagcttgttcggatcgagtttctctcctcccaacaccaactgagttttgtcaaagcaagcgtcgtcgatgctgaggatgcaccctcaggacgagatcctacaaatcggccaactgttttcgggtgggtacctgtcgcggacgtccctagaattgccattgggtttccagatcaacaccttttgaatggcgctgcatcatcattaccggctactaatcgaacgttagggctagggttgccgaatgtcctccatcaaccacaaattatccctcctcaaccatcgaacccggatgtaattccgctttcagtaacaagaagtcagaattctagattacttcgatcgacctccgcctctgcttccatacctgagtcagccaaagctgattcaactttcaaccggagtgtttcctcggggcatcagacccgactattggattcatcgttcaaaactcaggtgcttgatatctccatctcaagcgttggccatcaaactttgggaccacaaaaatcttcgaatttatcaggacccgcgccattgcccatatctggacttgggcgttcattgatagctagatccaactcgatacagcatcgcctagaagtcccgattcctctgtcgtctgtgtttcacgagtctgatgagaaccgaaactactcaactactcctctaccgacgacaacaactacacaaacaggagtaggaatgacatctgacgagccgaggggtggtgtgattgccgagaacgagatgccgatagattttaagacaatgaaacccatcacatgggaagctggctcgtacgacatcctcctccttctcgatacacgagaagtccaatcgaggtccgagagagacgcgttcttagacaagattaagctgacaggcgtggatgttcaaggaagagcgttacctgtgggtgacatggtgtggatagcgaagagaagggatgggtttggaacggggttggaagaagaggtggttttagattttgtggtagaaaggaagaggttggatgatttgatcatgagtatcaaggacggaaggtttcacgaacaaaaggtaaggccggcgtttgtttctcaagagtgcgtttgtgatcaggtcgacctgatgagagagtgtggtgtcctgtgcatttaaaccgaacagcatcgactaaggaactctggaatcggccaagtgatttatctcatcgaagattacaatgtcgcctatcaagaacaggtttgggcacctcagatcgcaacggcagtctcgtctactcaagtcgttgaagggttcttcgtgaaaaggacccagagtttagatgccacagttgaatatctgaggtgtatgcatgatacaatcaaaacccttcacgaggtaagttgtctttaccttttcttcttcatatctggaacgcatcactaactccacaaaatcggttctcttcctttctcgatagggcgcaaatttgacgatcatccctgatagaaatatttctcgatcaacctacctgtccctccagtcctatctccgaaatcactccgcctcgacgcctcatcttatatcctacagcgcctatgttgatttaaactctaaatcaaactcattgacactgcacgaactttggtgtaggatgttgttaaccatacaagggatgagtgcagaaaaagtgggcgccgtcgtcgaggtttatcgaactcctatgagtctatggagagcttttcagacggcagaaagggaagaggctaagcttaccgaagcgactacggtttcaggaatcagtctcgaaccagggaaggggaaacgacaacaggacagggtgcctatggcgaagaacttgttggcggacacaatccagggcgtaggaagacggtcgattggaagagcgttaagcgcaaaggtttacgaactttttcggatggaacattattaaaaaaaattatcgataccgattaggccactcagtttcaagaacaagaaggatacacgtcattagattcggaagagagagagagtgagagcacacgaccattctatctcggacagtgcgatgtataagataacaaaaagaagagaaacgagctgcctccttcccaattattg

SEQ ID NO: 3097 - DNA, 1893 bp, Xanthophyllomyces dendrorhous
tccaaacaccaattctcccaactttcctatgattcctcctcctccctgagacccctgagtcccggtcgcagaacctgacacagtcgtcatcgccgaccctcctcccgaagatcgggctacagcaggggaagagggagtctggtttaatcttctgaacgccgaattggaaggagccaactgaatcggtcttccgttcgctgaagtcgaagccgagctcgagctctgttttggagtggatggcatgccgggtttaggagaagaggacagttgcaagtgagacggactggtcgaaagagatggcgtggctggatgagatgggctgaggagaccttgtctggagctagatgggtgatgaggatcctgtcaaagacatgtataaagccaaacaagcaagaaatacaagttaatgaatgatgagaatacatatcccaattcatgtttctaggacgcagacatcggaacgctgtagaactcaccgcccacttgaccccgatcatccaaactcctccgaggacctccccattatgtttaatcgccctctctgcctcggcttccgtcttgaatgtcacgctaatccagtttccaccattaggatcgggaagagccgagacaatctctccgaattgggagaaatgctgaaggagtgggtcgaggagggatgatggaggtccaaagatggttactgtagtgagaagcaaagaagaggaagacgaagaagggcctggtggggggatagaggtagcggtggagagggtgttttgctgtaatggctgggagaacgaggagtaaaagttttgactagattcgaacaaaaaaggacggtcggaggtgaattgtcagatgagatgatgagagaaaagctagtgatatgagtccgaaccactcacttttgacgaggagatgacgagtactgttgaggacatgatcacgaacaagaagacagatgaacaagcaagggtaaggatataccattccactatttcccttgttctcaaacaggaagtcaacggattacatgctaacgtacctcgatatctccagaatccatatctccgtcctcaagcgaagcggtagggggcgcatagtcttgggacggagcgacggtcactcgaaggggctgcgagttgactactctaggcgaattgtatggcgatgttctaagaaacatacagcgtgagtttgcatttcagaacgaggagaagaatatatgtacgatgtcgatagcagaatcgtaccgatcaaacagtcctccagaaccaaatcgggtggacggagggctagggaggccggaatttgtacgaaaagaccctgaatggttgagtgactgtccgttgttgttgctgccattgttgagccacgaggacgacgaatttaatgttgggtttgctctgttgggagtctctggactttgtgctcccggaggtgtctgcatatcagatgagaagaagggaaagaaatgaggaaagtaagtaaattcatcatcaagacaaaatgcaagaacgaaagagagaacaaacccccttcatgctggatgtcaaatagccaggtaaatggttaggtgcaacctctggttcgtccatcttatcgtccagcaaggaatggtttccgtaagaaaaagccgaggatacagagttagcctgaccgttgacggacgaatcgatcgcccaccaggaagacggagccttggacattgcttttgataggtgagggatgaaggtgaacgaaagaaaggttgacagaagaaaaaaagaatagaagaaattgaaaattgattacaagtacaactacaaattcctattgaaatttcccaatgaactcaccttctcacggtggccccgctgacttgctccggcatctcgttcattattcatcgttcatctcatccggtgttca

SEQ ID NO: 3098 - DNA, 44286 bp, Xanthophyllomyces dendrorhous
ggtgttcaccatcaacattgacctccattcttgagccacttcggaaacttatagtgacatcttgcttcctttctttcactgcacgacaccagctattcatcgataagctataaacgacaacatacatgcccttggcatctcccaattctggtcagtttgcaaacaagtccgtacccgatctcaagcaccttgcgagggtcgacaaccagcccgacttgagatcgttttctccgaaagtactcgtctcgtccgcccttaccttactcacacaggcaaagcttgcacaagacaaccaggactgggagacgttctttgtatattctagaaaggctgctaagtaggttcttgtttatgcttccaaagcttaggatgcctactgcgatgctgaaacatagaatcttctggtctctccttctttctcgttacctttccatgttgtatcgcccaaagtatcgccctacagcttgtcgaactaaattcggtctcatctaaccattcatcggcccagggaacagagaactcaaaaactctcctcccactacttcgacttacggtcagtatgctctgtcctctctgtcgcctcccgagcttctgtagctcaccgccttacttgcttgccgctggtctctttcacctcatgttatccgccacgactcatcgtccgtcattgatttctctgcctctcaatagacttcggacgaattcaagagaaacgtcagtgaagcagaacacatcctcactgctcgagatcaggcacgtaagcgctcttcggtgtcttcgtcatcggctaccatgcatcccgatccgacatccctatcatccccttcctcaccccctagcgctgctccgatgagcataaaacaacgaatggcagctcttgcaggcgcaggactcgataccggtagtgggacgccggtatcagccgctaaacgtgctcctctcgtgaagtcatccgggctagatgggttaaacgggtacaagacttcttccggtcaggtttcaccaggtatagaaaagttcagcggatcgagtccattcaatgggacttcaccctctggagtatcttctatgtttcctggaaaaggtgtcactccttcccactcgtcttcgcagccttctgtgaatccgctctccccgtccgaatcccaagtggcgccttctcaaccaataaatgccacaaaccattcgtctcactcgccttccgcttcccttccgccacctaggcatcagtcacctccacctctgtctccaacgcaacaatatcaacctcgcttgtctcagccccctccgaaacctttcaagccctctacgctgtcggcgaatgtatcccctatcatcgcttccgctccattcatagaagcagcacaacaagagagagaagatagagacacagagatcaatttctcccaaattctagagccaaatacaccatttgatgccacaacattcgaacatcaattcccaagtatcatcgagtttgagactggcacaaagtttgtcgagcctccagtcgttccctctaacggaccttccagacggtcttccgtggctgttcccatcatgaatggtaatttgtcgtcgtcgccaccctcaggtttgactaacaaatttaatccatcatcagaaaatggcgacaatatctcaaacgggtttccaatcttgcctgatgcccccacatcgttgcccgtcaaaggatctcggccattaccgtcacctcctcagaatgcggcttcactctcctccgggctccatcatgctcctacttcaactagttcatctccggtgagtagtaccagcatcagtggaggagtagtcggctcttcgaataatccctcctcggctatcgacttgcatggcctagaacttggccagccgccctcgttgtctgttacgtcttcggggtccggctcgtcctctgtcaacttggcttcactcggtcacacatccacaatctcttcatcggctgaaaatccttcagcatccatgtctgtatcgtcatcctcctcgtccacagggactggagccggtaggctttcaaaaccagaatttccgcttgccaacacaatcttcgcttctgcccttcgtcaatatcttactcaaacatcagcccgcatcctcttgttggatgttcggccttacgcagaattcagacagggccatataccccatcctctctcgctacaagaatcccctttgccagagatcgtcaacgtcgatcctcaatggttaaactcatcgacatcgctttcgtccactcaacttggagggcatctccctccggactcggcgtttcaccaacgagcatcctttgatctcgtcgtcatatacaaccaggctggtggacggaaagaagtaaaagaaggaacggtcggccggttgggagagatgatctatgagcgagaattcggtggtcagacattgaagagagcgccagtagtgctgatgggtggatgggaagggtgggaaagtgaatgtagactgccacccagtgggtttggaggattaggagtaatgaaaccgttgattcctaggtgcgtcttcttattctttgctttgctttcccttgctcctctcctcccttctcatcttgggattgcatcatgattggtccggtggtcttgaccaaacatctattgcattcgtagtataccgactagacaaggatctggctcactagatccgattcctcctgtgtcggttcctcaaagaatgggttcaaacgcttcgacttcaactcctctctccgtttcatctcctcctctaaatctgagccgaaactatcagccgatggtgagtgcagtttggatttttttacttcttctgatcatgacgcaacgcgaaattactgttgggctagtgctgatatgcgaatatgcttcaactttcatctacaagacgacatcttcccaagcgtcttaccaacctccctccacctttacgccaccctctacaatctacgagccgttttcgaaagattacacttatccttctctcccccgtccctcatcgtcaagtgccaatactgctagctcctcgttgacatacccggcaccagtgttaacatcgcccccgccactagcatcgccttcgactgcctctcctaattcaagaagacggacagattatatagaccaggcttcccaggcgtattcaggtgctccttatccctatcaacctcctatttcctcatcttctccttccgcgggaccaagctctctttcaggacctactctaagctcgatcacctcccatcattcagctaggccgagcattgactatccaaacttgaagacaggtctgggtctagggattcaacagccaccgatggcagcagcgccttcgctagagagacagtctagcagaggagcagtcgttcctgtgagaaggtcaagctcgataagtttattggacggacagacctacgggcaaacaggactcggtcaggggagaacggatgagcgagaggtcgtctattggggaaatgaatttgtgggaatgagcgggttgaagaatttgggaaacacttgttatcaaaattcaacattgcaatgtttaagtgctactgtacctttctctacgttcttcagaggtctgtatatctgttttcttacatcacattgctcgctgggtgactgatcctgcttctcctttgctctgttcatagatggtcgctggaaacgagcggtgaacacatcaaatgtattgggcacgaaaggaaatctggctcaggcgtactgctcgttgatttcgactctttggtcaagagagtttcattttgttcaaccgctatcttttagaaaatcgatcgtcaagttctcaccgatctttgacggtaccgaacaacacgactctcaagaattcctcgccttcctactcgacggtcttcacgaagatctcaaccgagtccttgtccgacccgaacctgtccctatgacgtctgagcgagaggcagagttgaatgcccttccgcctcaagtagcgggcgaaaaagaatgggtgatctatcagaaaagaaatgactcggtagtggttgatctgttccagggacagtacaggtcgaggatggaatgtctgacatgccatcaggttcgttgcgtctttctttttgtcctcctatctcctcggttctttatcttcttcaatcgcgagactcatgggaactagaaatacatttttcgttttaactagacatcgacaacgtacgacgcgttcatgtacctctctttgccagttccgaccagtcgattgaaaaccagagtgtcacttgaccagtgtctagatacattcgttcgagaggaagtgatggagaaaggaaacgcttggaattgcccgaaatgcaagaaaccgagaacggctagcaagagcctgtctctctctcgactcccgcctgtgctactcatccacctcaaacgattttcgtccaagaatggcgtgttttgggataaggctgagacagtcgtcggttcgttttcttgtcttcctcagattctttacccctttgtttccgactaacaatcttgtaactcgaattatttttggtgaatcaagactttccaatcaaatacctcgaccttacgaaatacatgcccgctccgttgtcggacaaaccggatccaaatctacaggcaaagtataggagggacgcacgaactcagactcctccatacgtttatgaactttgtgcgtctaagtttatcgtctttgaatgataggttcagtctattaacttgtagatccggtttctgctgatagatgctgtatcaaaccatactggaagcctgagcagtggtcattgtacgtatgacagtctcgactcagtcactggacgagaagaaatactgaccgataatcgatgggcaactaaatagatacggcgtatgtaaagagttcacaacagaattggaaatactgcgacgatagaacggtgaccgatgtggatgagaaaaacgtgatggttcgtttaatgtattttctatggtcttctttgtttggatgtctagcttacgctgtatgataaccttctcaatcttatctcatatcagacgaagaacgcatatatcctgttagtagatcttcgtttgtactttgcgaaagccgactacacatcaacatggtttactaaccgctcttatttctgtttaacgatctctctatagattctatcgccgagtaccagcgactcggagtttatgatgaatgaaacctatgaactgagagatcaagaagagataatcgtggttttggaatacaatagacttaatcaaagttacatatatgaattacgtaaaatatatagcctgcaaaaatgcataaccaacctctccaaatgcattcacacacctcgcatttttgtcttttttttccctcgcccctcactttttttcctccttccttctgttggtgttcagcttatcctcaagagaagtgagcacaccgtcctgagatccttgtttatttagtagttcatgtgaagctgacatacattctacgtctgtgcatgtatcatcaagtcaaaatggctgtcaagaccaccgttccctccgccgaggttagtatgcggcataggctacaatttttccttcactcttcagccccactttctccctttcctccctccgtcttatcccttcgaccataacttttctcccgataaatcgatggcttgaaagaagggacgtagaagcgggaataatctaggagtagaatcagtagcaaagttggattcaaagagactcaggagatgaaatttgaaagttggtattgagaaaggagggaaggactagatgcgacaagggctttttcttttctctttcttttctttctttggaatgccgaaagaatatcaccgttctgacttctctttcctcccggaaccggattattgatattatagcaagttgccgtccccgagtctcttctcaagaagcagcgatctgctgagaagacccgagaggagaagcttgctgctgccgctgaggcccgaaaggtacgttttgattgcaactctacctttttcaacaccgtacgctttgtccacctccatccggcattttctcaagggcaaccaagtctcgttctatactcccaaatgttgtcaacacttttccatcacacctgtcccgccgacaaatttggccttctcgactctccatatctgtttccttagaaagaggaagagtgttctgttgttaaatgatgcatacgtctatccatgacgctaattgacgactagtcttgcacgacgatgatgtcctcaagttaaccatctttcgggactgaattacgacaagctcttcttcctctccgtcctcgttctctcgaacacatctgcgtttgactttgcgatttttccatctggcccagaggctgacatagatcgtctttctgtttggtcgtttgtgtgtgaacgaatttctttgtcaatgatgttgaacttggataatctacggaactttctctccttagaccaagcgagctcaacgacaggtcatcttcaagcgagccgagcagtacactaaggagtacgctaccgccgagaaggaggagatccgactccgacgagaggctcgagcttccggtgacttctacgtccctgctcagcccaagatctactttgtgatccgaatccgagggtcagtttagatcttgtatacagtcaaaaggaagacaaaattgacattggtcctgtattttattaatcgttactcaaactacagtatcaacgagatcgctcccaagccccgaaagatcctccagctcctccgattgctgcagatcaacaacgccgtcttcgtcaaggtcaccaaggccaccgcccagatgctcaagcttgtcgagccctacgttacctacggagagcccaacgtctcggccatccgatcgcttatctacaagcgaggatacggtaaggtccagaagcagcgaatccccctttcggagaactccaccattgagaagtctctcggagagaagggaatcatctgcatcgaggatcttgttcacgagatcgctactgccggacctaacttcaaggccgcttccaacttcctctggcccttcaagctctcttcccctactggtggatggcgagctcgaaagttcaccggttacgtcgagggcggtgacgagggactcagggagaacgccatcaacgctctcatcaagcagatgaactaagcattttaaaaactacctttcccttaactttttaacgcttagtttattttcttttaacctctcatgtgaatgttgtggtgggcttgatgacatgaagaaaaaaacgcacgagacaattgtttctttgtactgaatacggatcttggggttcaaagagcaaacggatagttttggattaaaaaacggatagagaatctcaaactgagagggtaaacactcatgatcagatagttccgatagaatcacatacatcaatgaaattttgccactcagcagtccgaatcagcgttcttttcgaacggctgttcagatgaaagaagaaatttagaccacgaaacgtagggttacagtctaaggtatgtgtacgtttgtgtacacttatttctcttgacaaaaccaagtctcaacgagacaaacggaagcagaggatgcagaagaagctgacaagaaagtgacatggatgaccaaggatagacgcaaagacaaaaaggtttgaagaacaattaagagaaaagaacaaaaaaaaagagatcacatgagagccgctgatgcagatatatgttggaacaaagttcaatatgcaatatggcgaagagaaaggacaacaaagatgagtccgaaattctggctctgataagggacaatgagaagtcaaggccagaacgaaattatgcgcgagatcgtaagaaaaagaaatgccagccgaatgaagatgtaagtacgttttaagaagaaagatatgatgagggaagttgtctagcctagttccttctgaatccaacgggaaaaagcaatgaaagaacacaaaggtgagaggagagaagtgtgatcgatagagacacgaaaaaaaagatgcaagatgttcgaagtccgaaaaatatagcaagcttctttttagcgtgtcacatccggagggaaggacaactgttgctctatattttactcccatgcttcagcgacctcttcagtaacttctccggttcccgcagggcaggagaatgtgccgttgatgtagtaatgaggagcgtaggactggttcagagccggttgaacgatcaagttttgaagatgggtcttctgattgttggcgtccgtgatctcgaagaagctttgtgaagcaggggtgggggtaagaatagaggccttggtcagattgacgctgaaacaagcgagagattgactaaggagaaagaaaagttatagatggagacgaacagagagctgacgagggacgactgattgacgatccagtagaaactgttgacgccagtgatgttttcgtagcttgcgatcaacgttgtgttctggtagtacccaccatcagcgatcaccaacgagtagggttcctgtagaggtgacaaataggagtgggagtgccatcacgattatgaaacatgagtttcaaggttcaacgaagagcgaaaacggagaagtagctcaacaaaaaaaaactgaccactccaggtccggtccaggagatgttggccactccacactctgtcaggttggaaacctcgagcgtttgctgagtgattggcgcgcctgctctaggaatgacggaggccgacgcgaacgcggtcaggatgacagcaggaatgaagttcttgaaagcgagcatgttgaaggatacttgaaggtacttgagagtgggaccggcttttcgtcgatagatggatggatggatgggtggaagtcagaagtcaaaaagaagaaacgaaaaaaggctggtacaaataatatgaaactcggatggtgagctgccaagatcaaagcagctaaaaaaggataatagttgcgctaggaacagaacacgaaaacaagacagccacaaaaacaggaacagtgacagacctgaagggaagggctgcctcctgacggggccgatcaaacgagcgcagcagcgacttccatcatacctagttacgtcatcgacttctcgctcgtccgctctcatacatgggtttccatcaaatccaaaccacgaagttcttttggaacgaatccaatctagagctttcctgtaggccgttgagaactaatctataaagctcatgaatactgcccaaatgaatctcgaggagcctccactggaacgcgatctggctatggtggtagccattgcggctcgagtggccgctcctaaacaaaatggacccgatccatgggccacatcggtctgcgatcatgttcgtgtttctcctttgttacaccactttgtagctatgtttgttgaagagatcgtgaccagtcttatccgtctgctcttctcctcgtcttcctcaaaaacagctacaactgaatccggcagtcttaccggacagtccatctatttcagacatagaagccatgcgcccgattgtcactccttcaacccatgcacgagtcttgcgcgcccttgtgtactcctccattttttctttacatagaaacaaggacacagattccaaagggttctctctacttaccaagggatctcctccgcctccgatcgagtatacctcaatctcacgagcggccatttaccgaaccgccgatgtgctcaatattccctcgacaggaatcatccccgaggagacagttgtcgctgctgaacttttcaagatgctgcaagcaatatcatccgataaggctcaaagcgagctagaggagcatcaacgagtcgaaaaggctagaaaagaacgcgaagaaggttggggaggtaaatggggacgatgggcagccacaggcgcaggcgttgtcattggttctgttgctctaggtatcaccggtggagttgcagcccctgccatccttgctctcttgcctaccatcggactcctcactcctgccactgcgcctgttgttctcggcaccttctttggactcactggaggcggtctcgccggcagaagagttcgaaacaggtggagtggagtaaagcagtttgaatttgtacagattgacgacaaaatcgatcctcttggtaggccaaaaccaaatcactacagggaacaggaggccaatcgagtggaagttccatacgcggttcgaaaaaagacgagtccgaatagtgggacaaagccacctctgttggaacccaagctagaggctttatcagtctcggaagaggtggacgaggtaaataaggcgagagaagagaaagaggaaagaaacacgacgattgaaataccgtcaaaagctccttctctttcagtggttattgttgtaccaggtctgctgacagaggatgaacttgaaggtgttcgaacatggagatcaatctctgaaacatctaagaaagggcccatttctgtcatccaggcagcgtcttcgtcaccttcgtcagagaaaacctctatggacggaatggttcatccggtccccgatgatgtagaaaccaaaggacaaccgaatcaggttcttgaggagatcgaattaagaaaaattgcgttcgattacgaagacgaaaaggtgcttatgtttcgaggaagggacattttcttggctaagattgagacggagatcatgttgagtaccggaaaggagatcaatcaatggatcacgactaaggtaggctagacttcctacatcgcacagctcgcttgcttgttagaactgttgctcatttcgcttctatcatatatttcatcagcttatcagcaaagctggccgagaaatcatcaaacggacgtttgtgaacgcttgttagtcacagctatttcctttaaattagacaaagtacattggctgatacgtttgatctggcttgcttagatctatctgctgtggcattacctttgactgtttgtgagtagtggatcttactttgcacgattcctcgccttgggtgatctgatgctcacttgctgtccactatcttccttttcctttctctattccgcaagacggctgggctggcactgcattggataattcgtggatgcgagccgtatgtgaagcttcaactcaaatgatactgtactagctgaggacagatatgaacctcccgtaactctctttgtttgcataggtcgacaagtccaagaaagccggccaggtcctagcggatgttctaatttcaaaagtccaaggctctcgaccagtcgttcttgttggaacctcgctaggcgcactcaccgttttttactgtctgcttgctctcgcttcctctgattctcctgaggcgctttcaatcgtggattcggcctatttgatctctctaccctccagcccatctgaggttcaatggaagaaagcaagatcggttgtgggtaggagagttgtgaacggctggtccggaagagacattgttctgtccggagttgtcagattacatgaggttgtaggaaaggtgggtgagggaagggtcgatggcgcgtctgttgctgggttgtgtaaggtcgaaattgaagggattgagaatgttgatttgagcgctgtagtcgatggtgagttctgggcacagaatgtgtgtgctcaggttgattttactaattcggtctttttctccatcctctttttgaaccttttgctataggtcatttctcgatcaaccggccacggacgttggcggagattttgcgccttattgatactgatgcttgagaacgagataatgtcgtacatatgatcccatgtagtctttgcctctcttctttctctctttcacatttacaacctcagttggaacacaattgtcagtgtgagtataggacggagatttgacggacaagccgagaaatgggagtttatgtctgattcatttacgtaagcaacaaacacctgccattttgtattttgttcctctctggtcttcaccccttcgaccgcatcgatcatcaacccacctttgctcgcccatcatcctttcctttctaaagcaaccgagcgaccacaggaaggcatccgatagggagaaccgacatcgtatgcccttttccaagaaacgatctcttcccgtaaattcgacaactgttgggtcgccttcgtccccttcctccgctgctgccgccatccccgccatgtcccccttgtcttcccataataatgccagctcgatgctatctacttctcctacctccaggttctctcttcgttcaaagtcactcgcacccactgtctcgaaagatactttaactgctcatggttctctgctgagagtagttaacagacggtcgaacgactcaatgtccggattctctccccccgtcgtcgggttgacgtcgtcagccccgttcgctcagggaaaacaacagacgccgactttgacatcgtcgtcgtcactccctatcggaggaacagttttgagcccaggagatccgaaatacgatcctctgaaaactcccatcaccagctatccagtggatcagctcggcgtgccctcatttaaacacgaggagtttggttggtgtgccaatcaggattaccgacatgtctcccaggtaagcccgttatctcttatataaatactgcttttttcgtcgttctttcattgtttttctgaacgttgccgagagcaacggagaactgagggagggtagacgatgttcgcttcccgtaccctacgcgtttcttcccttaatccttcctttatgcatctcctcgatcaatccgatggaacgctaatcgcattttctcctgcatattctaaagtacacgaactcggaacctattcatcaagaacccgttgaacctccgtactacgtctttctcaccacctatgtcaggtaagttcatacttactgaatctcacatcaacttctggctagttgagatataagattcgtctgatacagtgttactttcgattccttgtcagttatttgctcctcatctttgtaggacatatgagggactttttcggaaaacgaatgtatccttcgttctttcgagagcttatgccgcatgatgtgagtatttcgtttttcatacttgttatctcctgcgagataatcaacaaggtacttacgactcttgccatcgtcccctcatcctcataacagggatacgctgctctgaactcggattttgattcgttctacacccgtcgcttgaaaactcgaatcgaggactgcttctcacacccggttacgggtgtgcccggtcgatccattcagacattcgaccgatcatcaaacgattcaaacctgaccttccagtacccaggcacgaagacacgatgcctaaatatctcgtcttacaactatctcggatttgcccaggctacgggcggatgcgccgatgcggtcgaggaggccatcaaacgttacggagtcaccgccgctggggctcggctggatgcgtccacgttggatcttcacatccaagcagaatcgcttgtcgccaagtttgttggtaaagaggacgcgatggtggtctccatgggtttcgccacaaattcgactacaatccctgccttggtcagcaagggatgtctcgttatctcggatgagtttaatcattcctccatccgattcggagtcaggctctcgggggccagcgttaggcaattcaagcataacgacatgaaggatctcgagaatttgcttagagaggtcatcagtcagggccagcccaggacgcatagaccatggaaaaagatcatggtgattgtggagggtctctattcaatggaaggtaccctagttgatctaccaaggttgattcagctgaaggaaaagtacaaggttcgtgtttttcatctacatgtcggtcctttctcatttcgctatcgccttgtgtctcatccttcgactgtttttatcgaaaacacacagttttatctctacgtcgatgaagcacattctattggagctcttggaccaaacgggcgaggtgtatgcgattatttcagtatcgacccccgaaacatcgacatcttgatgggaacccttaccaaatctttcggagccgccggtggctacatcgctgccgacaaatcgttgatcagccgccttcgacttcgatcacatgcaatgtgttatgccgaggcaatgtcacccgccgtgatcacccagatcatcgcttccataggatctatcatgggtattgctcctcccctggcacttcctgcacccgataacagtaacgttcaaacagaaggacactcaaccaccgttcaaaccggggtgatctatgatgcgccagtctatggacccgcgccagcttcaggtcttccttcttggatgaacttgccgccaaacctcatgaatggaacagagggaagggaacgattaagaaggctggccttcaacgcgaggtatctctctggaggtctcaagaagcttggattgttggttcttgttcccttgtgtgatagttgatgatcgagatcacacgaacttaacatttctttttttccttttgttcaattctcacagcatcgtttatggtagcagggattcaccaattgtccccatgttaacgtttaatcctgccaagatgccgcttttctcccgaatgatgtttgatcggttaggcggccctgataccacaccaatagtgttagttctgtgttttctgcttatcgctcctcatgctgctcgtactgacgtctctgtccatttttttttcagcgttgtcgttgttggttaccctgctacaccgctcgtgacgagcagagttcgattctgtgttagcgctgctcacactaaagacgatattgatattattctacgagcatgtgatgagattggcgacgttcttgatctcaagcagacttcgccggaaggcggaaggtggaagttggaggatgtactggcgaacgcgaaggagatctcttcggccccatgagttctggttgagttccacttgtgaagaggagtaaaatggaacagggagggaggaaaggaattcctcttgttttatatttcatccgatttatctatattcagtttgattcgatcaatacgtaattcaccggcggacatttcgctttttttctgcttcttctctgcttcgtcatgtcacctgccccttcttttccttcttcttccttacgcctcgctcttctttatcttgcttcctcgcgaggcgtgttctacgtaccttcaaatggttcggttccatttcgcgtacacctttacaggtcggccgcatggcgacacgttggcctcattctatcccaaactgtttttgacttttttccctttctttacaagatgacgtctcaacgccgatctatcaccttctctaatactcaaattgacttgcccgtccatccgttatagagtacccttttcttcttctactttatctgttttctcttcatatagtaatttgcccaattcagatcttataatgatcatctggcaggaacaataaagaagattcatccatgctctgcttcgcgacaagtctctaaatctctccgtcttcgagatcatctggattagacggaacggtgatcttcgccctctgctcagaagcgatttccgacaaataaaccaaaggaaaaagacaaaaccagggaatacagattcaatagatcagttacgaactaaagatgagggaacgaagaaaagcaaaagaacgaaccttcgaggctcggtcatcaacatccctatccttatccttctccctgtccctcgtcgaagacctgtcctttcttctatctgacgtatgggtagctgtggacggaaccccatcaaagtaatccataggagcatctcttgatcgatggctttccaaatctggtcttcgacgatctctatccctatattcacgggaatgatcgacggatcggtctttccgagagttcaagtcctcttctgcttgttctcggatcttttccttggttgattaaattcagtttgtgatgataagaaaatatagagagcaagaatcagtaacgttgatcgtggtaaggtcatttgtaggagagcggaatatctaccttttgccgtttgacgaatttagagtaggtgtacttcctatcttcctcatctgtcagctcgttaaatagcttaattgtctgtaatcgaggaatcgcctattgagatagtgtttcaaaaatcacaaatcacgaattttaaacatgtcaacgagataaactcttggatggagagatgctacagaagtaagaatacatacgtcttcgtaggtagcctcgagatcaagaggtggctcgatttttttcatttcgtaccgaagatcatccatcagatgtcttctttttcgttctgcccgtcttgcctcctccgccgctctgtacgcaagcttatcgtgaatctgtattataccaacaagagagaaaaggtagggtcaacaccctataccaatgctcgaaagaatacgggaacattgaactgactagctcgaaaaccaatcggtcttcatcttcttccatcctagggatatccaaatctgttgatttcgctttctccaacgcttgttcgaaggcttcgaatgaggtttctagatcaaacacaaacccagatcttgcaaacacatctcttacatctccagagagatgttcgagccgttgatcgagatcgtcaactacatcttggaacatttcaagtggcgttgaacctggcttgccaaggagggcgaggtatcgctcatcctctgcgaaccgggggagagtctttttccactttgattttgcagtgagtatttttttggctacgagttcgagaagaaggttctgttttgatgttcaagtgtgttctgtcaattttgttctaccattctcgaaaacacgcacagaatatcgcaagaacaaaccttgaaactctccctggcctttctcgcctcccgaagtctttccgattttttcttcctaatctcaatgtcgtgctccagctctaactccttcatcctttcttcgaacaatacaagaatctctagtggttccacagaacgcaagtacgcgtctgatctccattcgttggagccaagaactagttcctcagcttcgcgccatcgactcgagaccgtcaagtcaagcgatttgaagagacttgtcagtttagcaatgttttgtcgtcgagtttctctaaggtcggcctgttaggggagataaagatgaacagaggaaataagaagaagggagtcagggttcaacacatctcaagtcggatcaagaagagataaggacaggccgactgactgattctctgttcctcagctcagagatgaactcgtcaaaaagcgacttgcgctcctcctcctgagtttgcttccagaccgaagaatcctgaagaagcctatcgacagttcggaaggtagagtatggtttgacagacggtgtttctgacaagagttttttgtactgaggtcgaagccgttctagtcgggcttccttttcttctgtcttccgtgctttcgtctcggcgatgaactagtcaagaggagaggcatgtcagaattttcctccgtgttgtgtcaggaataaaaaaaggaaaggatgaaatgaagacaagagatagaccttagtgaaaaccgccttcttctcggccaagcttcccaaactcttgtagagcgggtcagtgatgatggctctcatggtgacatcccaggtggaaccgatgtccacgcctgcctttttcaaaaggtatctgaacgcttcttcggcttcctcctgagtgggccaacctccatcggggattacatacttgtcggctaccggagcccgaggagcaggaatcgaatcagctggagacatacccacagaaggcttaatgggaacagcagcggccgaaggtgatggggatggcatttgaactgctggaggaggaaagttcatcaccttgactggtggtggaggaggcggagcgagcgaagcagacacccgttctagcaggagaagtagctcttctggcattgtccactgtttcagtcattgagttcacgcgtaagaatcaatcgagaagctctagagaagagaggcgggcaagaaagttccagatatattgccacttaccacagattctttcgtcactttattcacccaatacttccgaccttttgctacatactccttccacgcggtctgagccatcgcccgctcgaacggagtcttgagggcgtccggcttttcccagacagagactttgtttacggtgtcataccaactataggaaggcaaagtatgttagtgaagagaaataagaccaatccagcaaaggttgacaacaaacgagagtcgcgacgaagatcaggcatgccaacttactacatcctgccctctgcattggtgtgttcggtctaaacgccgtgcacacgacagtcaattacagaaacaagatgataagatgcatgcactgatcagccgaagttcatgaaacatgacagcaagcgacaaacgaagagagcttacataggaaggaacagcggcccctccgggtgttacggcaccagccggacttgcctccgaggcaacaccgacagcagctggcgtggctggtgtagccggggtagtcggaactggagagggggatgcgtccatctgatgatgaatatgttggatgaacgaggctagacagacgattcgaatttatctaactggccggtgatggttgatagttagaaaaagtaggtttgtctgttcgtgcgttctctcgtgcactctttgttgctgcaactccgtactcgagctgatgaccatctaacatcgggaaagatcgcatcttgttaccaatgatctactgatagtattctgattcgtatccttcgtttataatagatgagaacctagaagatttattctcaatctcgcttgaccggcatcactattggtacaagtgtaatccagatacactgatacgcatttgaagtatgtttcgctcctccaagtcactcaacacatcaagtttattgtttggagaatcatgaacggtagctgcttctgcgctcaaagagtattatccacaacagcgtgaatgattggaggattgacttgttgaaacatctcgcatatttggcagatttatttgatggcacgtcgaatcattgaacatctcctctttttctcctctaaaagcatttgttgtatctgtagtgttttgtctattcattgtttgttcacatgcttcacgagacgatatgataattactatttcttgatatgttcagttgcctgtccgttgagttatgtatgtatgaatacatagatagacgagtttgggagaagagatgcatttctaagtgaagaacaagtcgacatcctccatcttgttcacaagaccatcagtcgctcgataccctttcctcttgatcataacttctgaacttaagtgttttatatgatgcgctgctgttggtgtcatgtatgcgagttggtctttcctggtggagaggcgaccagctatctttacaaagtccatactgtccgatataactaatcgatggtattattagaactggcatcatgatctatcatattttctctgtccgagtccctcccttctgtcgcgaatgttgctcactagatgtatcgtgccatctcattggtctatagtgacttaagcatcgtattcagagtgtcgatttgctaggctagtgaaagcccgcctacgtcatcctccactcatcagatggctaagaggtcaagaattcatcgatgtggaggaatcactcagaatgcagagaatgattgagaaccacccaactgacgcgcaacagcaacggcgccgagaacgtcttctgaccgaggggactgaccagcaggaagcttaacgttcggttgaattaacatcaaagcccgttctgtttgagaagggaatcggtctttccacgttgctcgggttaaacaggaggtatcctgaccatgctctttcgactcgtccgttcgtccgtccgtccgttctgatcggctgcatgtccaatggctttaccggcttcgcttgcagctattctcggccatgtggactctcttcgttgagactataaagatcacagactcctagcaaatctatacatccatcttgtacccatctcaataccatctgatatcactccatacacttaaaccactttgtcgaagtcgctatgaaagtgtgtattcgctcgatgacattacatttaatcaatcaacatcggagctgacactgatcatgacactgatcatgacactgctcgtcttaatccaaccaggttctcgctatcttgtatgttggaggaaaggcagccgaagaagaatcccggctccttggcacagtagagaatagcgtaaggcctggtcttcacagtttctcttccatcggctaaccttacgcctgtgtcatgtctacctctcgcttcttttgaccatcctttctcaaaccttcttagcttggaatcaaagattggctcgagagccaaggtcacaccttagtcgtcactgacgacaaggaaggcgcctcgtctgtctttcagaaggaactcaaggatgtaagtgattcttctgattatacatgatgggaaacgtgaagctttatctgattgattctccatccagaccgatatcctgatctcgactcctttccatcccgcgtacctcacggctgatctactctcaaaagagaaatctcctaacctcaaactctgtgtcactgcgggagtaggatccgatcacgtcgacctcaacgaatgtaacaagcgcaagatcactgtcgctgagtgtgtatcctccgtttagttcaattgcttcgcctcggaaccgaatacccagaattgatgtctaatgtatcttgaatacagagtgtctggttcgaacgtcgtcagtgtcgccgagcatgtcattatgaccatccttctcttggtcagaaatttcatacgtgagtagttctttacgatcgatccgtctcctgaataccgtctaatattctatctctgtacctaattcccagccgctcatgagcaaaccgtgcgaggaaactggaatgtagccgaggttgcaaggaacgccttcgatctcgaaggaaaggtctgtaccatcaatcgtttacaatttcccgtgcaatattctcgaatagattttcaagtagcaattctcctatacctcgttgtgcgccaggtctgcggtgtaatcggagccggtcgtattggataccgaggtatggtcttccgaagaatagagagagcttgtaggcttgatctgaacatgtcatctcatcaatcttgttgcgcttatgattttcagttctccaacgactcgtccccttcaactgcaaagaacttctctactatgattatactccaattcctgaccgtgagagataaaattccaggcaatctttctcgtgtgctctcgccgtctcactaacttttattaactcttgacgtgaatccaaaagagtatgccaacgaattcaaacaccgacgggtagatgatttcaacgagttcctttctcagtgcgacgttatcagtgttgtcagtcttttgcaatcctttttctgtatatgtagatagcgcggcatcgaaaacaagacagaaggaactgaagtactcagcacttgattttggcgtattggatccataacagaattgccctctacacgaaaagacgaggaacctgatcaacaaagacactctgaaacactttaagaaaggcaagtattcttcactttctcttcgactgttcgtgaacttgcttgaacgcgctcttcacacctgctcataaaatctgcgcttcctgtattccgctgaataaaggcgcctggcttgtcaacacggcacgaggcgcaatctgcaatgctgaggacgtaagagatgctctggagagcggacaacttgccggctatggcggtgatggttggtggtttcatctgatacgctcccataattcttttgtaggcttgagcagaacattgaccggtcacgctcggtcttaattagtgtggaatgttcaacctgctcccaaggaccatccttggaggaccatgacgaaccctcttggaggagggcaagtattaaccacccgatttacctttgtcttgcctctgtcgctgacttctctgttctcgtcatatcaatacgtacagaaatggaatggttccccatatgtctggaacaactctcgatgctcagaagtacgtgactagtctggcagcgcatgatatatattgaaggaataatgcttattttacaacctgaaacattccggggtttttgcttgtgatattctatagacgatacgcagacggaacgaaactgatcatcgaacaattccttgctggaaaacccattgacaagcagaacttgatcgtcgccgatggacaagtttgttcttttcttttcctctgtagatttgggtttatcctagtctatccagtctaatcctcttccattgtcatgttttctacctatctcttgtgggtgaatagtacgcgacgctagcctacggacagcgaaaagataacaaataaggttttacctcgtttccacggcctgtattcttttttattttactcttcactctgtacttcttagtgtgtcaatacatccatccgttcgttcgttcgttgaatcatctgcactactagtcattctgccttgcagccctcgttgcccttaggtccatatacattttccctcatgcgtcccactgtttctcttgagatatttgacaacacaagctacttatttggtggctggctttccgaaagtcgacctcgagataaggagcaaagagatgaaggggatcatgtactattgatatggcatttgacacaaattggcccttcctcctcctctatccaaagcggctgaattcatataaaccaagtaagggatgagagaacagtcagtttctcgggataaaccagtcaaaaattggaaagtgataagagaaacatacagaatacagagatggacatcgactacattgcgatggtgatccaccatgtcctgactgacggccttcgtccccattcgtgtcaccattcatatttgcgttcatgatcccattcccattcccattcaaacttgaactctcggttccgttcgtgaatccacatccattctcaatctcatccgtccctttctcttctattttgattgttctttcatctggccccacaaattctgactctgtatcaataggtcgatatgtcaaagacccggacccgagccgatcgatgaataagctttccaaaacttctgctttttgtaataatgggaatgttcctgaaggaatcggcctcttgtaagtcgaagtgaagacttcgagcgccgtctatttgaaagaagagaagaaagagaaatcatacacaagatttcgaaacaatcagtactcgtccatgacagccataagggaaggcagcggatagcgtataaataatggaaaaattattcactttgttttgtgtttcatctagatcgtgaagtgggtaaatgattcgtccatcgaggttgtgatctttacaccaaataccagggtgcatcctaaatccataaacggggagacgtgtgtggtcagtctttatgtaacccgactaaacagaaaaaggaaggatatgaaaagatgatcgtatttgtataagaaatccactaacattcctttctcagccctgaaagatattacattgacatccctgcgactcgattttacctgataccatcgggtcatagtcagtcgttgatgaatatgaaattgcgttttcgtctcctcaaaaatagtatagcagagctcgaacgtaaggtcaaacctaccaaggtgatctcgaaaccgaaagtgaagccagctttgaaagcacatgacacgtgaaagtgactggtgttgcagtccatacattcaattacagctccttgacctgattttccacatagtgtgcaccgctttacatgtacaatacaccacgagaagaagtgaatagattagcagtgcatacttcagagacttagagatccgaaaaaaaacagtatgagacaacaggaaacacgcaccgctgcccaagattcataggcaacatgttcgactccttctattttactaagatgtttcggatcgttatatcgtacaggatgaaacacactacaaagtagatgagcccaatttccgtttatcgtagatttgagcgcgtgtaattggcttggttccggataaactgctttggcctttcctttgccaatagaaggtttaaaggggtttggctcagaggggcaaaagatgcaggtataatcctacggcggggtaaacattttggagacacaaaaagttaggggagttcatcaagaccatgtagtgagagatcatataaaccgggatctgaccgagtaacttactaatcgagcatgatggtgattggcatcgaaacaaagctcgcatacttgagtattaggagatgaagaagttactcggaaagacccataacaacctatagcattcaatagaaagaccccacagcatcgttagaaaagaaagtcaagagaaaaaacaacgcatcatcgacacactgaccttcgtgagctgcgaaatgacatatactgcaaaaacttaatgtgctactgggttcatctcgatggcagcatgcacattttgttggtgggggaggtggaggtggtgggggtagtggcgtagatgcaacaggagcaagcgcccgtttttttgtttgaggtgatgtgaggactgaaggtggtggtgtagagttttgagtaacctacgaagaagtcccgcaaagagaacatatggatagaaaaaacattagaaacaggtgaatcttgactatggtcaaacaaatatcttcaaaagtatcttaccctaactctctttcgagggcctgtaggtaccgccggtggcgattctcgtaagagcttatctgatttcacgacttcctctggcctaagaggtctatttgggacctggccatacttcagaaaataggccttgcacgactcgcagtagactcccgacagggctgctctgagcattgtccaccaacgagaggaaagctttgttgaacaagatgaacatgacgttttgggtgtgacgtctttatataaaagatccgattcttcgagtaggtgactgttggcgccgaagagtgacggctggggaggtagtttacgtagcgaaggagaagacgcgcgttgttcgaagtatgctcgcagagctccttctttgaagatctgatagtaccgaacggtttcagcaggagatcggccaatccttgttgacgcttcatgagcatctagtcctcctttttcagaaagtgaattgtctaaaagctctatctctttaggagagaactacgttcgaagaaaatatccttcagacatgaatataccgcaaggatgctagtaagcaacgaacacggggactcacagagatgatatccagttcttgaggtgtacaattgattaattggtcgtatgcttcctgaggagaatatgacatataaagatgaacagctctggtcaaaacgcccagatagtaggagggcactggtagtctagctaatcgaactcgagccatgaaacagttcacttttgaaattcgtagaacagaatcaagagaaaatgagacagttaacacgtttgcctcggacaaaaggtgaagaaagtttgtaagtaaatagtttcttacgttcgtcgacaaattcaggaggtttactttgcagctccactgtatcatctccgcctcgttcatagacatctggtgattgaaagatcacgatcaatactcatgtaatcacaaccgatgacgatacgcaataaaacttgagccaaagaacaagactcactctcaggacgcggttctgtcgaggagttagcctcaggtataaattgagcttgataacggggacccaggcgagaaacaacttgagggaatatgggatcatcggggtcttcgaaagtttgtaatgaagtgacgtacgttgagtttctagatatatcgaagtgcacatgagagaaaaaagcagacatacctaatgtatcttcggctaccgtattttgactatcatttaccataaaaatcggaaagtcaacatccaaatacatatgtctccgaatgctatacattcgaacagaaaagagatcgacttgcccaaagtatcgataaggaaatccacgaaagtacttcacaactttactccccgctatcttcttcgaatttttcgagattgtcactggttgtattgcctttttctttattccaaccttccagccgtccacttcgtcttcgtccagcagtgtacacggtgcacaggcccagctattacatgcgaaacaagtcaattggctttcctattttacaaaccaagagagatctcaagataaaaagatacttacccaaatcctttcgctggtttcgagattattggcggagtaagacaatccatatggtataatttgaggcaccgactacgaaagagaaacagaatacatgattagcatgctatgatactcgtaaaaccaagttttcattttggttacaaagatgatactcactagcaagttactgtccgtcgtggatctgcccatctatcacaaaccgagcaaacctgatagggctccgaccattcgacaaggctctccttttcacataggatgtatgagtagcgtgaagccaaagtgctcaatatatggcttggcactatttcaaacgaggcacgttgaagacggtaatcagtgatctcgcaaactgacatcttctatatagcctcgagaaactcttacaattgcgaatctgagaaacaagcatgacctcaaactcttgtctatgaaagtgatccaactttcagtctttgtggtgaaagcgacgcgcgcgccaagtagatggggatagtggaaggctcacttgatgtattggtcaaaaaaccggaagtaatagaaatgatctggtttttgtttccctatcggccattgttgttcccaattttgtacaacgtcagttaacttcttattcttgaaatgatgaaggagtcgcgtgtcttcttcattcacgtgagaatgcaggatagaagttggatgaactcacatgcgctgagattttcgatttggtctttatgcaagactgtaattccgtcattcatggtcaaacccacgtccacattaacccatcaactatcaggcgattgaagagaatagaaggacacgagataaagaactggaatgttttacaaaccaacgcattttcctattatatcagaggtcgacctaacggatgaatttatccccgcgaataaaagacgcgggtctaactgccttgcggtaaactatcagaaataaacgtatattccgagattaagagacaaatgatctacaccgtcagaaactgaaattggagagacaaaacaagaactccagtccagagaggatttacatcactgttcaattgtttccgaagaatcacccataaaatcgagagaggagattcaattaaatgaatatgtgaaggcgtttataagatcatcgatgggtagaatcaggttgagacgtacccaggtctagagacgacaggttgtgtaattaattcaatgcattaatacagatcatgttaatctccatcacatctggttcaggggacttctcccgcgagaagaaagaggaaatgaggaagagaaaaagtcgaacctgaaatagtaggctaacttgacatccagctcttccttctttcgactaacgattgaggaacttgatccggaattgcctagagaaggcggcaatgttgtaggtccagcgaaacccatcactctggccacgatcgatggttgaccgacgaatggagcagatatgtagacgtgatctgtaatgattgattattcccgaataaaatgtacgtttgtatacgatgatcgggattcagtaaaaaccaagacaaacagacagaggagatcaatttcaacagtcccatcgaattctccagagtgacttgcaaacaaagagatgagcgggacatgatacagagacaagaatatcataccatttacatgtacggtttctcctgtttctagtcgaacagaagaaactatagtcgaaccccctacggaaccagagctaaacccagaaccagacttcattcctttaccttcccaaccgaatgatcttatctagtattctctttcctctgaggaagactttctcagttcagtgcttctgcagatgattatgttcacacaaggttgatcagatgatctattgattggaactagttttcttgtttgaaagaatcttgagaaatgggattgtcagggggatattctatcctcaagatatagcccagtcgccgaggtaggcggaggagtcagatcagtcattcactcaagcaggaaggaaaggaggaaaagtaactcagatacgaacaaaagaaacaccctgtaaaggatcaagtcaggttttgcttcgccttcttcttcgattctcaaagagaggaaggttgagagtgggggaatggaggagaacggtcagacaacatcacgcgcatgggcaatgtctactccccagcgagcggctcagcgcggcatttgctgatttttcgcacaaatcactgatttctagacttgttcctttctggatccatcaatttgctcttcatataagttgcttccaattcaatttagtcaggacattcaagagatgggagtcaatggtgaattttcttcatcaagatcacctccgaagctctcaaaagatgtaagacgcaaggtgtatgccacaacggtatctatgtcggatcacgcgaacgaagattgtacagagattgccagcctgtaaaacccaaagagattgtaaccaaaagagggaggaaaaaggaacaaaagagggaagaaacggaggaaacacatcggaaacgagagtgaagaaggaaaacaagccaaaaagcaaggtgttatatttatttattttgaatcttcgccgacctctttcataacttttgaaacttttaatatcccgttcaagcagaagggacctgcttgtactgtcgacgccacatgctgtcaatctctcccaagtagtacgatccaggccagagatcgtcaagcgaaccgatgggcgaatatgacacggcgttgtgagtctcttctcggacctgtgtcgaagcgccgagcgaatttcaaaccaaaagagaccgattcaagaaggttgttagcggttgacaaagaccacggtccacaaaaaaagtcattatccaacgtaccttcagagctttgacaaagtcatcacaggggacaatcttcatgttgctcaatcggttgttgagatcaagcttctcagagatgaaagcggttgagctcttgaccttaagagcatagaaagaagcagcagctccagatccgtaggcgtagagagcaatgcgcttgccgacctgttcaagagaaagccagcattaaagaaaagagttcagttcaattgataaggaagagatgattgggatagagatcaagacttacgagctcgtcaccaggaacattagagaacaaacttgcgagagcaccgaagagagaggcggtgtacaagtttccgagctgtcggacggtggtcattccaggctcaacctgcttgttgaaagaagacttggaggcagcaatcagagatttctcgacattcttgtctgaaagacttttcttcatgtccaaagtagcaagctcggctggcacctcagcaaaaaccgggtcgttggggttgtttcggaagtcattgtacaactagataaggtgattcaagagatgcataaataatgagtaccagaaacctaaaagtttttatctcaagctaagagttacaaaaagactgcttacaagtcgggcgtggcctttgacaacctgctttccgtaaggactgttccaacaagataatatgatgacacgaattaactccgttgatcggttgaatttaaggagaatacagaagatgacgcttacctgtggaacaaaaggtaatcgaacgacgcagcactgacaccggcaacctcggtgtgtccgttggtgacaccgttagtcttgggtcctccaaatcgcttggcatactttgttcggtaagcttcataggccttgtcaatggcgttgacgtaggaagtgacggagagaggtccatcgacaatgggctatttggaggagaaggtttcagagttaattcaatggacaatatttgatcaaaaacaaatataggaggtgcgcagacgaacgtattcactataaagcaacaaacgattcgaaggatacgagcaccccgaattagtgtaagactctcccaagcgcaaacttcaaaatttgaacatacgaagaaagattaggcttgtagaagtcccaagcgttggtcatgaagtttccgtggacggctagattgatgagaatgacggataagggttgtttcagccgctggcgtggaagaaaatgacggattggaactcacgctcgaagacgacgggagcgtcgggtccgatgaggatggcgcaagcaccagcacctccggcaggtcgggcagcaccctcggcgtagatggcaatgtctccgcagaagacaatggcatttcttccgtcccaagaggatgactcgatccagttgacggcattgaacagggccgcggtagaaccgtagcaggcattcttggagtcgataccctcaatatctgtgttgccgtgggactcgaacaagtccataaggactgtcttgacagatttggacttgtcaatgatggactcagttccgacatcaattcgaccgattgacttgggatcaacgttgtactttgatagaagaccggaaacagctaacaatcaaatggaattgcaaaacggagaaaggtgtcagtgagatgcgcttgggcctttttcctgtcgattgctgaaacggaagagactgaccgttcaaggcgaacgagttgatgtcctcagtgtcgtcggtgaaggccatgaagttgttgccgagaccgatggtgtactttccggaaggaaccccatcaaaagcctcgagatccttgtgagcgatggcctgatcgagagaaatcgcggtcagtgttgtatttcgcgtcgggagatattagtagaaaatgaacaagatcaaagaagaatggacggaagcaaaagagatgaaacagtcgcccatatgagggcgagggatcgaacatgggaatagagagagaatgcagaagagagaatagttacgcactcgtcgaggaaagtagatctacagaaggagtagcgcattggaaagaaagatgacatgaatcgagaagggttgttttgtttgatgaagaaaaaaaaaggaagaaccggtcagtcgactaaagatgattaaagattgaacacaaacagaattgaacaacatacctccataccgagaattccaacatctttgggtcgctgttcggtagtagaagtgtacataactggatatctagattgagattgtgtatggttttgtgggtgtggtaagaattcggagagaacacggtagacgttttattcttttctcttctggcttctttttttgtgtctaaaatgggacgatcaaagtaagaaaacaagacgggtaaataactaaatggttacaaagtcgtccgatcgtaagacttcgtttatctgccgcaattcaagtggagtcacgtgtggtgttacatagccctgggagtgggctcgttccttgtccatccgcgtactcaaggtcaatcatctatcaatacctcgtccttacgtttcagacgaaaccctcttggaggacacgatggaaggtgatttgtccagtggattatacgaaaatttcttttttgtcatagtcctcattcgctgatgatctttcgctacttcttcacctttcaaagcttcctcactcgcctatatcgatacggtgtactctgccgactcagtagagttctcacatagacatccagatatctttgctgttgggacctatcagttagagaaacctgtggaacagactgctgtcaaggaaagcaacgggtcaggagacgagagtgacgatggtgagccaacgcgtacacctgccgcaaagaggaaaggccgatgcttggtctacagaactgacggccaaggtatgtaagttcgagttttctcgctcagcttgataaacttgcgctgtcgacttgacagtctgtctactttttattcttttctgtccgcatcagggaggagcttcaaagaatcgaaggacctgccatcttggacatgaaatggttggttcgtctttttgaaagcaaacagagaaatctcgttcggtttgactagcatatcagtctgcatatgtatctcactcgcaatgacctatgtttgagcttaggaaacctacttctgatccatcggaaccttccattctcgggatcgccgatgcagaaggtcgactggtcacccatagatgggacgatactctcgttcgcccctttcctttcttgccttcttcaatctggacaaagtttgacattatccttcacatacccccggaaataatctagaataaacttgtggaggttcaaactcttcaggtgaccgacccaaaaactctcgttctctctttagactggtccaatagggtaaacccgtacgtttctccctctctccctgtctagctaaatgaatggacttcgttcttgacgatataacactcataaacacacatatacaaccacgttgttagtgcctcttcggcttccctaatcacttcgctctcttcgatggaactttctcatctgaaatacacttcaaccggagaactagaggtggaaagaacgtggaaagcgcacgattttgaaccctgggttgcttcctgggacggctggaaccaaaacattctgtactctggtatgcatggcatcatctgccccacgccctcttctttattcgaagaaaattctatccaagctcatgtcaaacaccactgtgcgctctcattgttttaaggcggagatgattgtaagcttaaagcttgggatgtcaggtcggccgaggacgaccaaccaatctggaccaacaagaggtgagttgtcgtctggaagttcgtttgtctttatcgaagactgatattttgtaatcttcactctcaattcatagattcgatgcgggcgtgacatgcatccagacttctcctcataaacccaacctaattgctgtcggatcgtaagcgggtgattctcctgttttcgatcaaatttcgcaggaatactcgatttgacatcaatctttcaacttttctccataatccttggtttatgaaaacatgaagctacaacgaaactgtcacgttacttgatcctcgatacccactccgaccacttgtcgatccaatccccataggaggaggtgcctggcgaatcaaatggcacccgtctcaatccagacagaacgaccttctcgttgcatgcatgcacgatggcttcaaagtcatcagactcgacggttcaactgtcgagagaactgatcagaacgacggagaggcagaatggaaacttcaaagcttggagcttctgacgaggtttgacggtcatgagagtttggcgtatggagtagactggagtagcgcagctgttgaagagggaaaggaaggatcgttagtgggtagcgcgtcgttctacgaccatgcgttgcatctatggagagcatgatctgccttgatattctacctttgtctcttgcctcgcaggtacgcatcagaggttgctacatctaattgaacatatttatgtacgaagacgaaaccaacgaaagaaattagacgagaggtaatggaaagacaagaatcaaccgcgcggcctgcctctgccacttccgctccgactggagctatttgaaccaaatcctgaagatccattagccgaaggacctgtcggttgtctatgtatgctactcgatcctccattcccttcttttgccgcattatggtttttgcttccatccccagaacctcgtgaaggctttgtccccgaatctgtggtccccgtagcgaatatcctctccctagcctttctatattcttcctctctttcagtcaaagacctacccgctccagcaggcggcgtggttcctctactcccaccaggggagttattggttgagttcgtaggtctcttaagaagtgtgattttgggtgttggactcgactgtgaaacagtgccaggtggaatgctgaaattggtgtttgggttgaggtacatgccatattgaggcgtataaggaggattgaaaacaggagaagggccagtggatcgacgggcgaatgtcgagttggacccgtcgtgcagagacgggaaattatgggaatacataagtggagctggagtatttctataaagaacgagtaagagaaaggaaaccaaagagagcggcaaaattaggagagaggcatctgaagaagtagaacaagtcgtgaataggaggacaagaagtcacatacgcagcttcccagatctgacggttttgatcccatccacaagccgttgtccttgctgctgaaggtcctgatggagttctggtccattcatcgaattcgttctgagcattgttctcatctactagaatggtcgttggtaccatacgagacggaggaagaggaacctcagtccggttgggtacaaatacatttgatctggggttcagttctgtctaggacatttattttccacagccaacaaacacacccatgcaaacataaggattgacagaaccaaagcaaacaaagaaatgggtcggccaagtgcttctccaacgatatggttgggtaaccaaaaatcagaatacaaagaaaagtgacaacgtacttgggtctcccaatcttcgacgtcgacagaactgcctgttgggactataggcatagacatggaggacaagacactgcagggagttttaatagagccagtgtcaatggaagagaaagaaaagagccaccagagatcagaaggatgaggttgtctgtataactgttgcacaacaggctgttgtagaaaacatagagaaaacatagagaaaacaggatgtcggaacaataagccggctatcatacatagacaaaatatttgatatgtggtataagataaaaaggcaactttttaggtgttactcctatctgtcctcatcaacctcaactgaacattacctcgcttactgtgtctcatgaaatttaatttagtctacactctgataccagaggttctgagttctagttggcgcacatagaagacacaacttcgctcggtttgctcttccctctcaatgccaaatgatgctagttacaactacaacacacaacgcttgatcgttgaatgagtacatgacggttgaataatcatgctatataaatactgaattatgcgtcttctgatgcgcccccagacgttttcctgagacccttcatcttcctcgttctaaaaagatcatccgaaatcagactcgaaaactttgtgggtgaagatcgacaggaacgggagaaagaaaacgtactgtagctttccaagatcctgacttcccatgtggagtcgtccaaccttgtctcccatctcgtcggtctcgatgttctttctcttctttcccaaccccttctcgacgtccttcttgtccaacttgggctttttcattgcttgcttccacatatcctcatccgcctcttgacgtcttctgatcttgaaatcaaagtttggccccataggcgagagttccattcgagggattctagttccagagtgaagtagtcggatggtagaagttcggaaatggatgatgggcaaagtagaagcttctgatactgaaacagacgacgaagtggtagagggcaaaggcgggagaggaccggcagtaatggagataacatgctcgagaccagcaagatggacgtgttcgagagcatgaccgttgaagaaatcaaggaggagagacttgaactgaatcatggcaggatgggtttcgaatagaggagacgcaaaatgaaacaaaggtcggtgaccaggagtggatttgggggtctgggcaggttcgaattgccacgaaaacaaaagttattagttttaccattctattcagaatatgctgtagaaatcagctatctgtactgatcaaaatctaaaactaaccttgaactcagccatgccctgagccatttcgattcccagctccatcatgtccaataccttgccgtcaaacatcctggcaaacaccaaatcatgcggcctctttttagaatgcagaccaacacagtagagtgaggcgtcgttcttcgatgaccaaaactcgagggactcggtggactcaaaagggtgaatatcattcttcttggaaaagtttatgctgtccggtcgcttgagcatggcctaattcaacgacaggcaaaggtttacgcaagagacgatagttagaacatgcaaaacagagtgatgaccatacgtcaacttgtatagaacatcattcactcacgagctctttgagagcaactccgactctttcactgatctgatttcctctgacgaagattgcagtcttagggttctcgaccaccttggcctctcgttcctctaaagctcgcttcgctcgggcgttcttgggtttgctacacatggcatatgagggaacaaagaataagcaagaagtgacaactgatcaaaaacaactcttcaagaaaccatgacttcaattccaccacttacacagttcggatcatctcttgggagtatgtctgttttatgaaagactacagtagaaaacgcggttgtggaagacggtcctagtggtttgcgtttctcaatttctggcaatattgtcggacttgccacaaatttttgaccccagatgaaaccaaacagttgggcaaatatgggccttcgctcagagccgatgacaaacaaatcgcaatattacctgctcaattcgctccttttttattgcattcaataaagatcgatatgtatgaaatgagctcctcttttcagctcttgtagatcaccacccactttcaatgtccaagaaagaggtccctaaagatactcacagcagtttcaaggctcctggaacgatactgcgagtatggaatggattgaaacgcggaggaggatttcttattgatcaatggttcgtgtctggcactttcgtgtttgttgtggtcggtttggatgattgatatccgttccatccaaactcaaatcaggtttctccttggtatagtcattgtgatgcgagtcgctcaccatatacatgttctagccgcctcttctcgcttgattctaacgcatgcgactcattgaactcaactacaatctagattgctcgctcacttctttccaaatgcaggtcgaaacggcggcccgtatgtatagacgaaacactccgagtccaaagctcatgaaacgctgacccttctcaatcaactaccaactcatttctatcaggataagagctgtatgtctagactggcttgcgtttgagaaaaacaattgtctttctgtgtactaaggtcctgtctcccacaataggaatatactatcaagtacctcttggttgccatcatcttcttcatatctggactctctttaccgcttgcacaccgttcgttcaagtttttcatttcgctcatagccgaagtcagatctcactaacaccccaatctttcaacttttcaacagtctataaacgagctcttgattggcgtctccatgttgtcactcatattacttgcttcttcatctttcctgccctggtttttggtatcgtcaatgctgttcgagcatcggaccctaatttcgagaggttcgacagatgggctcttgtgggaatggtgcttatgggttgcttacctactaccgttagcaggttcgttcttattcttcatatatcacatatctcggatgcgagtgagcaatattaacagttctcaatttatatcaatcagtaatgtcgttatgactggacaggctgaaggagatcaatcggcagcgaccatagaagtcttgataggaaatctgataggtaatttagaggttattttgttcttctctcggtcaacagacatactcatacttctacttttgtctcaaggaacctttctttcacccgcgctcttaaaaatgttcttatcaacatctgaaacatgggcattcggatcgccaactccgtctggatcgggaggagtaggcgaaatttatcgacaggtctctgagcagttggggctcactgtgttcatcccactatttgttggagaggtgattcagtggttgtggccgacatttatcaggaagtggagactcaaggtaaagctagcgaaactaagtagtctttgcttgattggaatcatctggtgagccttagtctcttcaacgtatcatctctttccgagtactcaagcacaatctctcaggtcaacattttgcaacgccttctactcgggctcattcgaggctctctctggatccactgtgagagacgtcccttctttcttcttcacatctagtcatattcttacagtctcacactttcattatcttcatcaggtcaccctagtggttcttctgaacatcattctttacatcttcttcagttgcatgctatttacgatagcccgaattatacctatgccttcatttcttcaggatgatcgtctctcgcaacctccagcccacctattagagggtgaggacaagacgaatcatacgtccaccgggtggtgggaggagaaaaagttgatggatgcagagacgacaattgctcttctattttgtggcgcggctaaaggttcgtcatggaggtgatctggacaccacatcacgatctgagagccaatcttgctttgtttgttatccaaatcaaccaggtatcgttctgggaggtcctgtatcccaaattctctacggaggactttcgacctttgatagaggaaaaattaccatccctgtatgtctggttgcttcatctttctggttgaatcagaagctcatcgatctcatttcggtttcgtttgttctttatggtaacagctgtatgtttatattctttttttttcagctatcctagacttgtcataacatatcactaattgcttttcaacttcatatagtgtactctaccagggctcccaggttgttgttgcacagggcacagttgctatcctcaaagcctggcatcgacgagtaaatgctaagagccaaagtcttatcaaaaatgagccggacgctgaattgtcgaccgagcacatcgacgacaagaccgagagggcttccgattcaagcgatctgtatgaaccttatgtggataaatcgaatattgtggaagctaagattcgctcgaacacttgaaagagctttgctaggattctgctttgtctttaatcgcaatattgcacatttataattctatcccttttcccatacagctatatcctacataaagtttagaataattttcaatctatctataatgatgtttggtttataattatacttcgttatgcgcgtacctgattccttcccttcttcgatgttgaatgaccctgactgtcatcaaatgatatatatgaattcaacaatatcatatatctcatttatcacttagttaaattcaagtctgagtgggctcagcccaggaaatctctcgccgcctgttcaccttctaactttcttcgatccatatccctcttcgttccatccagcttcgtcatgttcttttgtgctagtgagtgacactttagctaatagaaatacacgccgaatgcgtttaggctttgtttcgtttttttcctcatcaactctcgttttttttggcggttcgtcttcagtctcgggaacgcctcctatcaacccagtgatctcgaataagtcgggccatctgtatgagaaaagtctcattgaaaagtacataggttagtctttttcttttatgttatttgatcgccttcaactctcttctacataattagcgtagccgaaaaaaaacattcagaatctgacgagaagaatgaaccgcttcctttccggtggcttaaatgttttttttttcgcgacacgtacttgtagatgagaacggccgagaccccatttctggggagtccctgagcaaagaagatctcgtcgaagtgaaagctagtgagtttgttctttttgtatctctctaagtaatatggatgtaggaatggtatattttcttccacctgccagaatacgccgtgaactaatgaaagtaaaaacgaatgaatatgtgcgatcgtaattcatcgttcgttcaccataggtcccaacgttcccgccccccgtccttccgctgccacctctatcccttcccttcttcattccctccagtcggaatgggatgctttgatgcttgagtctctagccttaaaaacccagtatcaatcgacaagacaagaattggctcacgctctttaccgagaggatgccagtttgcgtgtcgtcgctcgacttgtgaaggagcgggaccaggctcgagagtgggtttctcttcactttcttacgtgtgatcctctgtgaagaactcatctgacatgacccaattaatattatagggccctcgggtctgtgcaagccacactgggtatcgctcctcccgctgctggagatgtggatatggacactgctgaggcttcttcgccaaatgagctttctgctgatgctaaagccaaggttgaggctactcacaagtcgtaagtttctttggatcggattattgacagtacctggttggaattttggctgacgcgtcgtctatttgattcaaccactagcctctcgtcgacccgtaaaaagcgcaagatcccatctggttacatcgcagctgatgttctttcgacctacactgagactgccacagttccttcccttcactcgacgaagcctcctggaatttctgctcttgatatctctgctgatggaaatctggccctcactggtggaaacgacaaagtcgttcaaatctatgatcgagtttcgaacaaagttgctgctaccctcaaaggtcacaccaagaaggtcacccaggttttgttccgagaggaagaaggtgcttctaagattgccgtctcctctggagctgatggaaaagttaaattttggtcggagggtggggagggcaactggtcgttgagtaactcactcgccgcccatactaaggacatcactgggcttgctctccatccttccaagggatttgttgcctccgcctcgatggatgccacctgggctttgcatgacatcgagaagggttccactgtccagacctttgaggctttatccgctgatgagggttcttattcgtattcctcattcgccgtccatcctgatggtcttcttcatggaggagccaccatcgatggcgctgttcgaatctgggatgttcgtgataagtcatcgcttgcagcaacgatctcaaacgagtccggggttgccatcccagcactctcgttctcggagaacggttaccatcttgccgtcgccaatgctgcatcatcctcaattggaatctttgatcttcgaaagctctcgcttcttcattccatcgacctcccaaccgctggagctcccggaggaggcaaaatctcgtcccttcgatttgatccatctgggcagttcttggcttgcgctggaactgatcttcgggtgttcaagaacaagacctgggaggagactttgctgtacgaccagaacgcaggcgagttaactgatgttagattcggaccatttggaaaggagattgtgcttagtggtgccgacaggactattcgagtccttggagttgctgctcaagagtaaaggatagggacaaaaattgctcacgcaaggttctatggcatgtggaggaaggatggtgaaagatttgggaatgcgttgtaggaagaagccaattcgtttatatatcaatcgttttctatttcctgttcgttatctgcgcttgtcatcaagtgtcatgactggttgttggccgactggctaaccatactgggactaacgagatttggagcgatcgccttcttggcaacactagatatctgaaccacgtataacataagaatcgtgactttgtgttatcacattgttttgatcgccatcttgagtaaagttagcagaagaatttcgagcttcaagaatattcatgtattgtgtcactttgatttggcgtctgcttattgcagatagtcttgttcatttcatcccatatttcctctattccatatcatcttcgaatcccttccgaagatataaagaaaattgtctgactgggagaacaacgttgtatttgtattttgtttgatccagagttgtgagctcaggtcattgcaaaagccatcaagaagaaaacgttgacgagaatatctcaaaagggttgttttgaaaggaaacaaacaaactccgagtcgtcgtctcatagccaccatgatgttcaatctcgtgccctggtgtgtattggtatctcgtttcgagaactctctcggcacattgtcaagccccagctacgcgaccgtaaatgaacaagttataatagtatattaaccctagcattgctgaatatctaccgaaataagtgggtgaaaatagactcttcgttttggcattcgttttcaactaagtccccactgatttcccaaaattacatacacaccatccaggtgtctcaataagatgcactgagaaaccaggaaaaaaaaaggacaggaaacccagctagaaatctgtatctcttcagcgggagagtcttgggagtccgcgcaaagagaaatctgagagtgttgccgtagggggagataataactcacaactgaaattatgtcaagactactgaatttccaacaaaatacaaataagatcagaaatctatgtttcaacgaaagttgcacctccatactgtgcagtcttaaagctcttttcgtcctgggcaaccaggacatcaataatatcgaatacaatacagagaagattagcattgcccctgcataaggatgacacgattcgatcagagtggagaccttcgggtcaaattatttttttactcatgtatctacatattctgaattccacatgggcatataatctcaggaaagcaagaggttgctatatatgtatcagaacgtaataacttatgacagatggaggtaggcaacacagtccgcttcctcagtccttgaccgatcgcacttggagcttcatatggaacccttcctccttcttgcccttcaccctcggtctttgtaccatgtttgcccgatgctcatagtcgatcgccgggacgacgctctcgaacgtcaactggcggaggatgacaaacagaaacgccttgatctcagcaagagcaaaccggtagccgcttcgaggacagaagaaacagagcgcgcgtcagctcgtacagcccatacggcctacggcccatgtagcccacctcatctgaccgactggactcacatgcatccccgaggacctcccaggactagtaggacccggtcgaccggcagcgatgtcagcgctcatcagcgacagtcaaaagacgccacgacagacagagcaggctctgtactcacacgtcgcttggtgaccatagggcacatcaaggtccatcaccgatcgtggcatcggctctagccatcgttccggtctagagcgtttcccacgacgagccaagagattagcaacaggtcaacgcctcgacactgagacacggcgatccaagccaggctaggaaagaccagaccagaccagaccagaccaggctgagtcgcaacagagaaagccccgactgacctgaagatgtcagcatcatccttgccgtacatatgagcggcacggttgatacgcatgatcgctgtgtccgacgcacgacaaatccacacatatctcatcagccagacggacagcgtgtacatccagcggacggctgctctactcacggacaaacatcgtcgtcccctttggcacatatatctctgtcatcagcttgccatcccggcccttgatgggctcgctcagagagatgatctaggccaagtgagcacagaccgtggaaagaccgaaccgatcagttgcattcgtcagtctgtcagagaaaccggggacacagcagacacagcagacacagcagacacagcagacacagcagacacagcagacacagcagacacacgtacatcatctttggcggccactcgcatcgtgcccggagcgggcggggtgaaacgaagactctctttcacaaactagacagaccgaacgacgaagaacgacgaagacgaacgacgatgagcgcagaagaacacagacagatgagctcagctcgtcacacatgccac

SEQ ID NO: 3099 - DNA, 1181 bp, Xanthophyllomyces dendrorhous
gtgggtgagtgagcgtcttgatcagtcggtccagaccgacggctagctccgaccagcatcccgctacgtcctcacatcacgatcagatagacacagagaccatacagactaggctcgctcgtctccaccttgagcagttcatccctcagcttgttttgtatctctggccgagtcgacaacgagtggagcatccaggtcagagcagtcgaagatgtcctaagatgcaagagaagtaaagagatccaccagcgagtgtaccggtatgggcgtgtaggtgtgagcgtatgtacttgaccatgagaacgagatatcacaagacaccagcataggacgtactcaaacccagctaggaggagcgtagagatctgcgcgagcacttcctcatcacccagtcggttctgctcagccagatcggtagccatgttcgcccgtactacaggtgccagcgacagaaaggaaagccgagcagaaagaagacacaaggaagacacaaggaagacacagagaagagacagagaagaggtcagctcgctcggaaggaggcacataacacctcacgaacatcacacaaacaccccatgcggacagacctagagagctcaagatgtccttcccctggacgtctgctttcccaaggcccttcccgccatcgacaccaaccgagagatcgagaacggctttcttcttccgagcgaggatgtcctgtgtcgaccgtcagacagacgtccagagatagacatgtgtgtatgaacagcacacataaacagcacacatgagatcgatagaacacaccaagactcagacagagacagcaaagagacagacccttccataacggttcacagtcatcatcgctcgttctcggatggcctgacgctcggttctctacatcaaagccagtcacatggaacaccggtcagcatcgtgcacatacagtggacggacacccatcacgacagatccagccccgggagagcttggctcagccagattcagctaaacacagtcagacagagcccggcagagatgcctctgagatgggacaaaacgtacgatgtagtttagcacaggaaacagatcctgaaggacgcctagtgtcgactgtccagacaggccgtcaaacatcgtcttgtaagcgatagaaagctcgttcgactctttctcgatcgagtcaaagtcgt

SEQ ID NO: 3100 - DNA, 19542 bp, Xanthophyllomyces dendrorhous
acatcaagcgtgcactcaccggccagaccgatgacatccagcatcgcgcggccctacagacaggcccatccgttcatcagtccgttcatcagttcatcagtcgagacagagaagcaacatcagacaaagatcgatacgtacgatccagaacatcacatccaccccttcagataccagcctcgacggcccagccttttctccttccgcctcggatccgtccgtcggcccgtccttcttcgccgcctcctccgtcatcttctccgtcagctccatcgccttgtcaagaaagatcggaaagagctcccggatcgcctgggcagagaacgcaggaaggatgatccggcgctgccgtcgatgggtctcgcctgtggggacaaagcacgcaaagcaagagcggatagcatcagcttctctcctccccaccgagcgctcgaccaggcagagccgagagcgctgccagtctcacaagagagcacggactgaccctcagagctcagcagtccatcaccgacgatggagcccaagacctttcggatgtgccaaggcttcggatagtcgtacgcctggctcatcagactattccgttcaccacatccagccatcgtccgtcgtcagacagtggacagcaggcagtggacagtaaacagtggacagcagtcagcaaccagaagtcgacagtcagcaaccagccactagcagtcggaccaccgcctcagcagtcacagagagagcgcactggttgaacaccttcggatcagcagagtacagcctaggctggccgagcatacccctgtacacaaacgtcggtccatagaccgcctccagatggctatgtgcgacgcctacttctagcctgttcaccacaacagacatcacaacagacaccacaacacgtcagcacaacacgtcagcacaacacgtcagcacacatcaatagctatcgccgcccggtatcaggccatatggtatgggcagcaagtgattggctgatcgccaagctcacttgatgatgtccttcgcgttcccatagagatagctctctagcctcggacctgtttgctcatgacaagacgacaagtcggagagcatccgacaagagacaaggcaggcaggcagtcagtctcgagcggtcacagtcagcgctatctcggccacagacgacaggtcgaacctggtaagttgtacagaggcgatcttcgaggagccagatggaaccagtcgacgaacacggccaagccgatgagacccaaagcgagtccagccgaccgtccgggatgatcgataacgatctgaagcacgctgaaagacatgtcggtgttgatattcgggttcaagaagaagcagaaagatattgtatccaagtactcaacaatcacgatcgttatgctttttgttcggccatgcatttgctgatcagtatcaatctgatcacgcttatttcatgcacacgtgaaagccattgtattaagaagcactgcaccgtcatgttgcctctcgagtaggaaatttgaatatgaacgccatcttgtttccataaactatccccggagttccctatgatctgagagaaggagaatagagggttttgaaacgcacttggtaaatgacgttttaacttacttgacacatatatcacgtgaccatcgcctcctttaccgcctctatcgttctttcctccagatgtatctgatctctacttccaaccgttagaagagaagaccataagcagatagaccatccgtcatgttttcgttcagattcctcgctcagactggagcgcgtcttgccggtctggctcaacatagagtcctcgttacttccagcctctaccgtccttctgttcaaagctccattggttaccgaatgttcaacaaggctgttgaccaaggagacatgtcggacgcagcttgggagctcaagcgaatcgacgataagaatgagaaggcggctaggcaggaggtagcagttactttgttcgagaaagatgagttgtcaccagaagagatcgtcaaacacctcaagttcgtgtattcaatattccgatcaatttttggacaattagattggcgagagacgataagatgttcacctttgactgacgagatagatctttggctgtatcgatataggtcagaaaggaaactgtctatagccaccgttaggtccgttattgatctcttttagggagaaaagacagagcgagaaacagaagacaacgtgttctctgtctcgttcaaattcttaaagacgtcacccttctcaacctactctcctgaaccatctttgtatctctttgtacatttgaaacgcaaacctttgactcttcagaaagtatctgatacaacacgcgatggtcaacgaagacttttatcatcttctggaggatcccgacgtatggtgagagctgctctacgttcctcgatactcgactcggtctgccgaatgttgtttgtatgctgacattccaggttcggtcacgtttgataccgtgtagggaacgattctcaggtgccaagggtgcatatcgtaagcatttcttgttttgacccagtttttctctacatcagtcaaagtaaatgaaaacaaagaaattctactgacccaatattttgtctataaatgcttcctgtgatcagaatcgactccgaacatcaaagtagcaatatcacttcacaaaagatttgagcagatggacatcggtacttccctcagataccccttcaatcaatctatagcttttgctgtcatggttttctgagatcaaggttccttatgtcctttcttgactcgatgtgtacagatcgagaagatcatttggtgaggaggtattccaataaaggaggaggaatccgaccatatcatgccggacccaagaaggtacgattctgcaatctctttcttaagaatcttccaaatatcacatcagtgcccatattgaatggagaaagtcagttgatggatcaatctgatgaatgtatttgccttttccaatggtgagaattgttatagtacaaataccctcggaacggatacaagcgaagaacttgataagctcagggtctcattgtgcccgtataacttacaccttaataatttggccatctatagtttgatatgatctccatatatcagaattagttcgaagacagacaacctcctctttcacaatatatatcaagttggtgtcttctgatgatttgaactattctcttcctgatgtgctatatttaaataccttagcactgacttcaggcgaaattaaagatgaaagataggaggaaaggtaaaagaaagttcattttcattcgcaagaaactcgaggaaacgagaagagcagtaatgttaggcgtagtaggatgttccagacaagattgacgacaacgccgatatttgatcgtcattgaaccgttttttgtcctccgcttcccactacatcaggaaaaccacacaaggaaaaggtcagaagtctgactctcgatgaagagaaaacaccagaaacaagaatcaaacgtacagtgtcttggtgactagccttgaaagaagaagcgaccttgagaacagtcgttttgatcgggattggatcggtagcatgctgtattgaagtcaaaccataagtcaccaataagtatgtctaaatcattatccacaaagagcgttgtatcactcacaggagctagagactcggcaatcaaatctggaatgtatgaaggcacagaataagggaaggcttcgacgatggcaccgattcccaagatggctgagtgcatgattgtcaaagaggtcatataagtgggatcgacttctccattgggaagccgtcgcttaggaatctgagtttcccgaatggtcttttggaatttaacctgtggatttcgagggagaacgatatcagtctatgttttggttagttgtgaagaagggaaacgttcctaccttcaaatgcacaatactctctcgtcgagctgaacatatatatataaacataatggaagatgaggcccgactttgaataaatgatgaatatcaaggcttgacttacaacatcgcaatactgaagatagtacagaagcagcaacttcacgtacatccaggttttcgtcaactaagcattccgtcaagacctagtaaaaggaaaaggttagacttcttcatgcattcgggttgatagctaaatggcgtcactcacatccatgattgaaacagcggtagtttcctgaacgatcggcaaacctcggaaataaacagttgcaaggacactgttacgtgatattgggaatgttggagaaaataaataagtcagcaagatgatgcaaaattgagatttgattaaaactagcaatgtggcttacggcaaaacgtgcagtctgatatgccatgactagaaatagttcgcgaacggatatgatacagaaagtcggaaacagacaattttatcgatcagcagcatgacaaatggcaaggttcggtgaacatttacggactttatgacttcgcaaggttttcaggaggacgaagagaagtggctcgacggtttcaagcggggctaccatcaaaacgcgaccatattggtcagtacaatacagactcaacagaaggttgcagttgatcgttttgcgacagactcacgtgatacgccagcgatgagcgcaagaacacccgcggacgacttttgcaattccatcgagtcctttaactctcgcatctatttcggaggcgtgttttagataatgcatacatccaagaaagagaacagtttggaccacaaacctggaaaatttcaggaaggataggaagcacggccgtaaatgtagcagctgcgttgacatcgatcaaacctcgcttcaagctaggatagagaacggatatccaaatattgaagaacatcaatcggtgatagaaacttgtcatgtagatgagagtaaaaacaaaaacacttactatcgtagtagagagagggaggttttgtcatattctgaagaagatcccaatggctgtcacaagttcaagatgaggagcttttattcagtacctgtatttagattcgacgagcgagatgagcgcactccagatggtctaatctctctccaagtgtttagacgcgggacacagctctcaatatgcttcgcgtcagtggatcgatgcaggcttaagggatctgaaagaggatttttgcactcctcgacgaattttagaggttcaagagtgcacactcgccactatgataggttgcatatccaagaccaacaaccaaaatcagctcaagacttgatactacaaagaataaagtccttctcttaccctcaatttctccaatcgatgtaaattgtcggcaaggagttctcggatcttgagaatagattagaataaattacggtgatcagaaaggtgcaaaccaacatatagttaatttgaactattaacctctgcaaaatcgttgccaagggctccaaaatactcgtcaataaattcgcccgaccaagcatcgaatctccacgacaagcatcgcatcagacagttgatgaaattgagagatttcgtgacttgattgcgaaaggaatgcataagttataacaccaaacttgcaacattcttatgatacacttactctcgaaggcaaatccggccgaatagtctaaagacttggctttctgaatgacaaaatcaatcattggctgtacccgacgaggatctcgtttgaagaagttgaatctataacaggacggccattctgtcagatctgacatatcagactgcaaacaaaagataacgacttactcgaagaacatggtccagctgagtaaaagagaaaacaaaaagtcagtgatattagcaggattgaacgattcagatggtagactgttattcaccagctcaaagtatccggtttaatcttcataaagatgacaggtaaagcgctagtaaaagaacgatagacgagagtcagcaaacaacaagaacatgaatctaagaaagaatgtcaagaaaaagctcaacttaatacatactcagaaatccaatcccagaactgtcttctaggctgcgttggccaatgcttggaacctctgacgaaacccgagataacctccgccagagcacgttgatgatgtctatcggggacaggttcggcgaggattctatccaattcggtctggaccatggcaaacggctacaagggacagaaatagacgttagacatttcatcaatatagaaggccgtctaaatcacaacttactctatctatgtagatttgagataacgatttcagaaagttgatgctgtccccactcagatactttcggctatcctcttgtgaatatcgtgcaaccaactatcttgaaaccagttccttagctcatttccacagctgtaaaccaaaggatgatagcagactgaccttcgaccaccaggatgagtcctcgacgaaagaagatatggctgcaatggcctcagcagaagtaggatcccattggaaaggggattcagctccagcctgaacatagtaggtcaaaaccttgtcgaacgcaagccagccagacgtgggcttatcttgaagaagcgtcgtcgtgtcatctagagcgatcggcaccttgaattctgagagatatcgagagccaaattctttcgaaccagaatcaacgatcactgtccgcctgagaggattgacaggtttatcgataagaagttgttccggtgatgcttcgcagaaggtgcgaagttttatgaagtgcaagattttggtcatggacctgacaaaaacgaaacagatggaactggtttgagtcatcacgctttgatttgttctcaaaaattaaaggctttttaaacgcacaattgtgcataatgcctcaactgagggagatcatcgaccaagcaactcataaagaatgatgcaacgttgggattgattggccggtctcgtcggacaagagcacgaagataccgacaggcataggtttgatacctccaatgggtcgtcgggctgagaatcaaactggtcagatgaacgatctgatatccttgaatgtaagatattgcatacatacttttcagcaaactcaagcaaatctgacatcaacttgtcgagctgagcatctcgggtatcaatccgggcttgcaccagcttttgcaactccgagttgacgatagatccaagttgtgtgcctacactaagggcgtcaagaaccttgtctacttctggattaggcaatctacttcgaaggctcgatggttcggcagttcggacaatagtatcttcggtgattttggcgaccaagctttggatagatggctgcaaaggtaaaaagtctatgtcaagtgcgtttcaattttagatcgtgattacaaacgaaccttctcttgttcttgagtctgcatcacacggagaacgtattgaggaaaaatatcagggtcgaggataccaaatgatgctgtcacatacagattgaacaatcagattagattttggtacgttggtcggtcgttgatttgagtgagagatatttaccaaacgattttgagcctaaaggtgaccaaaggaaacaaccatgattagacgggtttgatcacatatcatagcacatcggtcgaaaatacggaacgaaccgatgatgtagagagcgcctttcatttgatcaggatctacacccttcaataatgagtttaacaaccgaggataggccaatgtcttggtgccgtcatatgccttattataaataaaatctcgataggtcagatttgaggtagtatcaagattgatgccaaagattacttacacgagcgacatgatccaaagctccctgagcgtgcttccgtacttgattgtgaatttataatatcctgacaggattagttgacgcaaaaatgagaagcgatctgctaagaaaatacttacggcgaacgtatggagacaaagcgaaatcaaccagtttcaagataagctcgtcatctctggcagatcttttccgagtccaaccacaggcccttgatctcgaagcatgatagagctcggctcgagcaacccagacccgccgaggcaacaatcgttgcttggagtggaatttgagagaagtttgttgcaaggccaaactcttcttcttaaattcccacatccgatcatcagagccacaagcgagcactgagatcataccgcaataagataacaaggcagcaagagatgagatgggcagactcacgagctcaaaagaacaagggaccaaacttactgtaggtagagatcatactgtacgagaaaatcaaagcggacaggtcaattctatccatgtcaaataatgaataaagaagtggcacttgacctacttgatagtggcaacgttcgcatcagtcgagtcatccccagcttgacttctcaagtaagtggtagctttcacgatgaattcaccgatctcatttcggaaagacgcaaatgctacatgcttgggatccgcaggatccgtcaagatgaaagcagctttcaaaggaggtaggttgactttaaattccttgggagcgatgctgtattatatgaaggagatgaatgtatcttcttagttaatcgaagttcgagatggagtatatccaagaacgacaagaacgatgagacgtaccccttgtcagttacttccatcccgccttgcttgctaaacggatcttcaaggtagtatgactgcagcccttctaaggcatgcctaaggaaggataaatctcgacagtacgtagctgaccagtccttagtaggaggtccagcagggatacccgagtccagagatcggacagtaggaacaagcaatttctggatcaacctctcggcaaactcgagttctccttgagagggaacatgccaatcgatcttgcattcactcgatttatagactttacctagatgtagaaattgacaaatagcaatcaataacagaacattcagcaacggcacatctctttaagtaaagactaaccccaataaagatgcgagttttgcttgaagtctgcgaagaaaaccaaagagagataagatgatgtctagctaacgtagagggtttaccaaaacacaccttcactctcccattcatccttgttgacaaaccgagagtcttcggtccaacaagttgtcatcctagaaagcaacctcatcaccatcctagctgtgatactccaggaccgctcgttcctagccgtcttggccgtgaactcaagaagctcagtgagcttatcttgatgtctcaagactgaagagtcagtgtagcttagcatcccgctcaacagagccatgtaggcatgaagagtgatatccccagatgaaggaagagaagccgatgttgtaggtgtcgaggacgctccgttctcgagttcaaatcggatcttcttagcgcacatagggaaaaatttgtcaaacgtgaggccaaaatcaactttggcaagggagctgacaagctgagcgacaacgttaactgtgttggctcgagctatgaattgttagatgataagagttagttcaaagtagatccatcaccctttaaaaccatggtgacttaccagtcgtgctcgcactatgaaaaagcccgagcatgagacaaatagatcatcagaatgtaatgtatgttccaactttcgatgtgaagaggagagaagaagaacatactagtcaaagatctgattcagagcttgagtgaaaagcggctgactcaaatgcgtaaataccacagagacactcttttggaccatctgattgactgtctcttctgatttcccaccggtttttaaactctttcctccttggtcaggcagattctcaaacaatgtgaggactctagctataaactccgtcaaccatccagacaacccagctgtcgaatatcgaagggcctgattttcttcgggaatgggtaatgcaggcggtctatccgaatccggatctacagcttctataggcagaggaatagagtttgaagtaatccaaggagcaggattcgcattctcagcaggctcatagtccgtaaggtcagacaaggagacaaattgaacaatgttggcgatgaaccacgtagttgatactgtcttcattgagtcgttaagatcgatacccgggagactaccatcgatcatgatacaggccccgcaaaacgatgtagatttgctgagcatacgaaaaaagacgaaaaaacaaggtttatcaaggaacgaggactacgcaccaaagctcaagaagaggcaccaggttctttcctccaagataatatagctctctagagactagaggctgagcacaagcagctaagcatgtcaacacagacggcgttcgatgggtctagtttgcataatagaggaatgttaggacaaaatgatcaaatttgctgaacaaatcaaatatgaggataaaactaacctcttctagtccagtcaaagacggataagctcgttctaacacggactgcaaaaccagatccggctccaacaatgacagatatctcaggcaggcatggctcaaagccatcgcggactcaaactgaatatcaaacgatgatcgaggtgaataatgccgggtgtcaatacaccttggaaagtttgatgagtgaaagagagtaattaccttagagaacatggaaagtagagcgacagttcggagcgataagcagaattcacgtttaatctctttggtaagtcttcgcgactacaagtcagtacaaaaaaggaggagaaactttagctctatgctgaggatattaggcgttcttttgtcagagagagaagggctcacaggaggagttttgcagctacgcttctcttcggccttccatctcttgacgaacacagccgatagagcccaaataaaagtagtaaggttgacgacagcacttccgccattctacagtttcgatcgtgaacgttgcgcaaagaagaaatcagtctcttgattactaagatttctctcgtctatgttagaaaaggaggcgaatgataaagtcctaccgatggatggaaaaagccctcagttgtgacaatgaactttgccagcgcatccatagccctacttcctcctatatacttcctctccgcaggccctccaggtaacctaccttctttgctagctcccccaagtaggttgctggcggccagtaacccaccagccttagtgagctttggggttgaaggagtagaatcgaatgataaaggtgtagctgagcctgattggggcagaacgggtgcatcgtgagacattgaattgacaatcaaatgagcgagagattctgatgacgtattggcgcaataaaaagagcagacagagttagtcgaaacgtgtatatacgacaaaaggacgtgtgattaaatagaaaaaatgagaagatacgtacggactctatcgcttggttttttgaacttctgcatagtttcgttgagcttcgaatcggtatactctcccgtcccatacttgagactctcttctcctccgataggaacacctggaaaagaattaagggaatcagtgatgattacatagccatgttgtcgccttctggacatgactcactcatggacttcaagcaaagagtcataatccctttccactcatcttcactaaaaatccccacatccttataaataccagtccattcgctctcattctcatcaatatccatcgaatggctacccttagtcgctccgttttctccaagtgcaacaatctccgtctcttcgccttcgagttcgtctgctcgaagcgcgagctcttcttcatcgccttcttcctcgtctgggttggttgtgtattggtatgtcggggagagaagcgcgggatccgagactgcgggattggagtgtagctcagaaagtcgagccaatagatcgagcatctggtcatcgaatgttgccgagttgaaagcttgggatagtttgaacactgcaaaaaatgaatagtgataagttctcttacatctccttgtacgataggaacatacaaataaaagcttactcataggcaaccacttttgtggatgcgtcataggcaagaaatggaccaagaaagcctgggttccgatgatagtctgaaggatttggacacaataacacttctaatgaattcatgcttccagaatagttcaagaaacgcgtgtctcacattgatgtcattcccatctaggccaggtaaaataacctctaacatagcgtcaacctcaccaggatggaagaatctctgacaactttcagtcaaagtcaacagcgctccagagatgttactggaaaaaaaggaagttgttgacaaaacagatcaatacaatttgattttcataatacaaaacagcgccaaaaaaaaacatgttttatcccaagaaactcacgtgataccagttttacgcccttttgggaacagctcgattttaagacgatcataaagaggcctccaagggagcacgacatctttacgtgagattctacttcgttttctatataacgtcgacgatatgtcaccacatcagtccgaattagagatggtttgcacgcgcataaaagggtttacatactctaccagagaaatgacaagtcctgagaaggcatcgactaaacgagcatccgtaccaggagccactgatgaaacaacgtatatcagtatgaatattgggttagcaatcgctatagaatgatattgcaggttcagaaacgaaggtaaaaggaaacccaccagcaagttcaaagtagagcttgaccaagttgactcggacttctctttttaaagggtacttgaagctaagccatcgaacaagctctttatgccatctagggaatgtgacatcccagtcttttgctcgaatggaatgcactagcttatcgatgatgatgttcaatcgatcatccatctcggtgagtgactcgaccggatatggtaacgatcgctggtaggttaacaacgcctctcgagggtccagaggagtggtggatgacatgactggaagatctgtagtgctaactgatttggactaagatcataaaggaacagctgacggattgttagtaggcaagattggagattttcaagagaccactcaccggatagtcctcgtcttcgtcttgatcgaaagcgtccgggttttcttcgtcactggagtcgaaatccttgtactcgtcttcgtccattcaatattgagaaaaataaaacaaagatagaaaatcaaaggaaaatatctgaaggatttgagttatgtgctgatcgaggggtgtgtgagagtcaagaaacgaaaccactcctagaaagatgactgtcgatgagatgagttgttcgaaagtgtcgagtggttgagcggtcaaagctcaatttgtcttgctggagatctcctgattatgacacacttttaaccctaaccagctcttgacatttcaagctcgacacctatctccaagcatcttgaacaatggcatttcaggactcaaagtcctcgtcagactatacctatcataggtaaattgctgaggcccaatgacgcaaacagcgcaaaccatcactaaacgctagatacggagatgaccatcgctctctcatagaagttctcaatcacaaaagatatggttcaccaaggtatgagacataccattcatcttctattgaaatttttatcacaatgttcttcacggacttttcaacttttaattgatctcaagttccccggaatttaaatgttatcttgctcccagctgtggtttcgttgatctcttgacatccggctgtgattgaatagatagtaggggagctgtgcttttggtggtgtcacgtgatttgatgcacgctccctttaaccatctataactacattacttctagcttctgtctcggccgtcctcaagagacgaacatccaccaagacattcatctcgatctctggaacactttctataccatgagcaataccatcatcctgtatgtaatttctacactgtaatcatcatgtctgatgcaagaatagaggcgtgtcttcaagtgatctattttactcacgcggagtttctgcagctaccctctttccaacttttcattcaggtacgtgattcccttccttcgagcaaggcgcatgttaatatttcatctgatattaatctgtgcttgctcgcgctatatctagctcaaaagaagctcaaccggaagaggatgcctcggtatcggcacgtcttcagcgactacaaaataattatgaagagtttggtatgagaaggaccatggaaggagtgttactcgtgcatgtgcgtattctcttgatttctcttctcgtcctgagcgatgtttgttccaaatatctttgtacaacaacataccagtaatagctgcccgttatctaactcaaattctgcatacatgctgatattcaatctaggatcacgggcatcctcatattctcatgcttcaaatcgctaatgcattcttcaaactgtttgtgactgattcggtgttcctgaatgaatgcgcaaatctatcggcttgtccacttatccctcctattctataaaattcgtaatcaacatggggaaaacagaccaggagactacctacagccgggtgaagacgaaactgaaggtcttaaggcaagattagacaagatgctgtcacctgactcgagcacacagttcgacacaggggtaagctcttgccttgatacctttcataaacataacttagctgaccaccagaaggctcatgatttatctataacagatcaaccaagactgggaggtagtggataccttggcaaattggtatagaccatcttttgaaacattcatggtaagtacatggataagatcatcatatctgcattcttctgtctcacaccagctgatcccgtcctccaataattttctcattcttttcattgtaaaaatgacgagagtagtatcctttcgtccccgcacacgtaacaaagccaaaagagtgcaaaaagcttgttttggtccagatgccagaaagaagtatgtccactgcaaaaacattccaagcttgtcaaaatgacatgcatatagtcaaacattcatgtatgatctctctttttttcttcctcctgaataagaactgttatcggtgccgaagaacatgaagctgttggcagttcctttgttcgagctgtatgacaatagcgcgaggtgcgaaccaacctatcatacatctgtatgatttcagattattaatctgttcgtttggtatccccagatatggaccacagctgtcagctattcctcatcttttgtctcggtgagttggttggatttgttcttctgtgcgttctaatcaatacaccaagtttcgatcactgaatttctctcgccacaggtacaatttcgtttatatgggacaagacgaataagcttcctcagatgattcctctcttatttttggcaacggttgtcatttcatctgcttttgatacgtatatattccggatatgacgcactttctatacacctccttttcttcttccttaagtaatgtgtaaccatatcttctccttctagccatcttacgaagtcatggagtctgtgtagcaatgtttgatttcagagcaaagtgattacctcaggttaaggtacggaaatatcaatgtatccttgacccacgcacaactttccgactaaggcgcatatattcaacaaaaagcttttctttccgttcttctggtttctaattatcagccgccgccctaagcgaagccaagattccctcttcttgctccaggctaaggacacccgatcgaccagccacagagtcatcctccaaaactagatcgtaagcgtccgctacgagaagaggatgtatcggaatattattcctaccgagaaggataacgatgttggagacgagcgatattgattgtaatgtcgccggtgggatgatctgtttgttgtgccagatttgatgaagaatagcgaaatcaagacaaacgaatgaacatcatcagtgatgactagccaagagagaaggaaggaaggatactgtcaaacatacatcatttttggaactgtatacaccttctgcatcaaatccactaccagacattcctccttccccatcgtcctccggtatcggtgcgtgcatagaaatccaaatatatccgttcaagccaagaatcagatcaactccacaaggaagtgtttgaaagtgagatttcaatcggggaaccagcgcaggtgggagggtgatcaacgttccgtttttgagctgtgatttattgcatacgtgttcaagatggtgttaatggcgacggcgcgtgagacaatatgcaaagacgcttagagtatatgtctaacttttccatatcgtaaggaccgagtgtgtagagacattgttccgtcacccatcagcgtttgaacctctgccactagtaactatatatgttgcggttaaaaaagaaaaaaaaagacaggaacaagttcagtaaacgtggttcgttggttaatctgtactctacgattacgttataagtgttgagcttacatctccttcttcaaaaaatctatgagaaacgccgtagataactcggtcagtatgttatttaggagcaaattcaagctgcaatcgatcgatcagaacttacaaacgcatttgaagttcgtccgactcgagtttccttcgctttaacaaatcggtttcagcatgttactcgatcaaattctcctgccagcgcatggtaaaacagataaagaaagagagtacaaaatatgttgaatgtgttgacgctcacctgaacaccgcctggcaaattgaccgagcttaacatcagtacagcatcctgtcgggaacctgtgtcgaccttccaccgtttagcagcaacctatttgcatgtcatgacgatcaagcgtagccgaggctcaataagattaagcgaatgtcccaccgctttgggacctttacgacaaaggacggtattggaaaaacgaacctctgtgattctcccaaccactaaatcaccgacttcagggatgaacctcgctcgaagcggtcgcacgctgaccagtttgttgactctctcaactttacccgtgacagaagaaacaaccttatcgcccgagacatacgttccatgaccactatacgtgttgcagcccaatgattcggcccgttcatccaaaattcgataggtatagagaagtaagttctcaaaatcttctcaagtaggtaccatcgatgccccggtaccaactgaatcgaggaaagaacaatggctgaagccacgagaagaacaaaacgaaccgcataaaaagtgacgagctagtgatggtcgatccaggagtagtgaaattactcgaaccctcctcaaggtcgagcccttcgtcctcatcgtcactcatagtaacgtccgggtggtgtcgaagggaagtcttcgtgcttgggtcatgatacgtcggtgcggcaggaacgattcgaaacatgatgtagtattatatgtatttgtgtgttcttgtgtactgtagggctaccctcagtcctttaatatatgaggaaagagaaggtaaagagaagaagacagatccaggtcaacggtcggtctttgaggtttggacgatttggacgatgtagttagtgtgggctgtaaagtattagatgatttgactcgaattttcaaatattatctcatcgtcagccaccattgacaacacattcctaattacgctcgtactcacgaccatatccacaatgaacacgcccatagctcctcccgcctctgatgtctcaacaaagacaggaactgtgaagattttgagtcctgcattgaaggagaccgagagtgttacttcttcgacgccagttgtacccaaaaagaaattaacaagagcacgtacattctcaatatgactactcctccgttcattcaggaatatacgacttatcgtgtgatggtcattgtttcatgtttaaatgcgatacaggaagagcaggagaaaattaagaaagaagaagccttggccaggttcgttgcattacttcagttatatcatatcctctgacctgtttaattgactgtcctggaccttatcttgtcgacgcatagaaagaaagctctggacgaccgactagttcgtatatcaccttcgtatcgagctgtccgtttacgtacgatggaaaaaaatgttctgatgcacctaccatcacaacttaatcacccttaattctgatgtagaaaaaccgatcaaagcgacggccggctccaacggatggtgattcatctgagcttccgaaacctgccaagaaagccaaagaactgagtacgccatccttcttatttgactttctcttcttcactattggtaaacctagcgcgaccaagctttcgtccttgttcgtattaatgcaactactgatcaccacgagtgatcttaactccgccttagccgcatatgagaaagaggttttggagatctccaaacgatctggtctttcagattcaggggccgggatgagatcccttgtgaagtgaacacagaaccactgtcgatcagttatgcgctctggtccttttctcgcgggcgtacgtctctgtttcattgatacttatcagccttgacagtttatgggaggaaccgtttcttaaacgtgtaaacgaatgccttcagacatggtgagagttacctcaaccgatggtggtcgatacatggcccttttggacttgggtgccctcagaccatgaaccaccaagatccccatgggtcatgggtttagtttttgccagcctcagtgccagcctcagcagtctcaacatcactagcgacagcgtcaaagcccggcattcttgctcccttgttcttttcctggtgaagggcaaggtgcaacatgttgcgtgacgcattgacatctctgttccaccaagtctgagagagagaacaccgtgaacaagcatagagaacaatcagtcatcgagacactatcataagatatataacagacacacggcacttactcgacagacgctccgacactctttcagcgcccacgctttgtgtcttccagagaactcgccatggcacttgaagcacgccctcgacgtccgatactctcacactttgcggacctggagcagcggagagaccctcagcttggcatgcagcgtcttcacaggactaggtgcatgcccatgagaagacgacgagaaggcgccgtcgccgaaggccaggaaggtgcgtggacgtcctgccgacagacggagtgccaccttgtgttacgcttgctcgcggctgatgtgtgcgccccagcgaagacgtctccaccttcgagcggcgaagaacgtcgcgagcgaagagtaggactgaaagtgcgagacgagagcagcgcggagaccatcgagactggcagatctgaacgaaggaagatatgaagaaagacaccgaagaaagaagccgaagcacgacaccgaggtgggcaaggcagtttgcaaggtcagtaaggctgtctatacagtcagcttgaacgtgagtgtgaacgtaagcggtactcaccacggagagtggtttacactttcggatggttcttcatccacagccgctgtttccgagcgtctcggtccacccctgcaaggtgc

SEQ ID NO: 3101 - DNA, 23709 bp, Xanthophyllomyces dendrorhous
cctgggtccagccccacgacttcgtcctctggccgcacatcccacgggacatactctgctcggtgatggtccttgccttcgccctcccatctccatccgtagtcgtcgatgccagatgaagacgatatgggtctcagcattccggcagacactccgatgccgtccgtactgagcgaccgggcgaactgtcgccgatcggtctcgaccttggatatatggaatgaccgcctctaccaagtgtcagagtcatcccggaagaactcctaaatcaccctgcggatataccccacatccgcgtcctccaatttgagctgggcccagagatcatagagagccatggtgtctacaaagacaaaggacgaccggtggtacgagggcggcaggagcgagaacaggcggaggccatgcccccggcgacgagtagtccgtcttgcagccgcatcttaggggccatgttcctcgaagatggtcagtatccggtacagagggcggagataggaccaccacgaggccttgatggccttgcctgtcagaggcaaacctccgaagatgtcatctgtgaggaagtcgaacaacactcggagatgagcctccatcaccgtgcgctggtcaggaaggaggagtttgagtagccagggtggggccaccaggatgcggcagcttgtagtggctcctcctctgtattatcttctctttcttctccctcttctcctcctcgaggagggggaggggacagttgctcccagagttgatgggagagggcagtgcgctgaggacggatagataggtcagataggtcggctaggtcagtcattgctgcagcctttcttcagatatctcctcagatgacttatcttccttacctgactaatactgatccggctctggatcacttcttcgacgtttgtctccagccaccaagagacgagccgggaagcccgatggggcatgttcaggacgacatggttctggcaagccgtggtccacgactgagctttggtgtcgatcattttgcccatgtatctatgacaacaacaaatcagtcagtccctgttcacagccagctgcatcactgtcatcaccaaatagatcactcactttgagtctgtggactagtgctcagcagggaaagaggcgtcccggatgtggttgatcccttcgttcagtgttggcgctccttagtgcagatttcctccgcgcgtgttgaaaccaacagcctggagatagagccgtattgtattggggagatttggtatctcccctccatacgcgcagacctttgacatgtggatactgagaaggtgagacgcgtcgaatgttatctttcctagccgggcaacggccgactcgatcgggccagccagtggcccaaaggcgagtaaagagccaaaacctattttcaccgtccgtgacaccatagggaccgctgacttggcgcggatttccaccctctgacgagggatgtaaaatgggcagaggtgatcagatcgccttgagtgcccaacttgactgcaggctgagcatgtggcagtagtagtattggcagcagtagcggtattggcagcagtagcagtagtgttagctgcgaggcgagactttgcccaggcctgagccgtcctcctgcgcttcatgtcgaacacaagaggagcggcactcctcaaggcaactgatgagtgttctgatatgagaaagtgttctaatatgaagggatgttctgatttgaaagagtgctctgatcgtctcgagttcgtggtgtcttataagctattgggattgatgtctgcttgtttgcaggaaatctcctttgaccggttcgactggctgccggtcatgatgaacgacctggtgaatgctttaccgtccacagacaaagataaagataaagacaaagacatgaatagacaaagagatagagagataaaggaatcgcgagacatagagtctctctactgtgtctgtgaacttgaagactccctctctcgtggcggctgaaaatgcttgagagtgataaaacagcaaattggagttggcaggattcgaacatgcgctccctgaactacgtagagccgctcttcccactgagctacaactcagatgttaatgtgaaggatgctcacatccaacacggcccctcaagcttcacgttgacttagtgttgctacttttgggctccagccacattacctaatcacctgtaacccagcgggcatttttacacaggctgatcgtggtctggagtgtctttgcgcttatccgggctcataacctgataaaatagggagctcttggtgttggattctatggtcacttagacaacaattgattctatccagttcttctgaatgtagaccctcgcaactaattctcccaagcaaattctctggtcctgaatctctgaatcagaattagtttttgagagaaccagaatcagattcagagattcaggaccagagaatttgcttgggagaattagttgcgagggtctacattcagaagaactggatagaatcaattgttgtctaagtgaccatagaatccaacaccaagagctccctattttatcagagagaacgtcatcagggcgagatgtcgatcgcttgtgtgcctgctcgagttctgccctgaactcaactggctgtgcctgcgaaattccctttgtcggctgaacacctgtcgaccgctgttcctgtttctttcctgtcaacgctcgttcctgtcgatgctcatcttctgctcctggctcatctgtgcgctcgaaagctctcccatatgagatcgtccttcgtgccatgttacctttcctttgtcttcatctcatctataaatatctcagctactgagacaaacactattgagcaaaattcatagacttgaagaaactcatctcaaaccctcaactgctggtcgatgttgtacacaatgttccgaatcaccctgcatacaagaaagaatcatacaaattaatgatgagcattaatgaacaattcgaacgtgcgaaaaagatttgtttcaatagggatactgacgccaggacgaggattctagataacgagatttggtacatgaagggagaataggttatgacatcatctcatcggctccatgatcatcaagagctcaaataaaacattcacttaccccccaccaataccattggacacccttgaaagtagctgtgaacagcccatacacggcgagcgcattcaacgatgtagcagcatctagagctgccgataatgttaaagtgtatttctccgaccacctagggctacagaaaagcgcaagtgtataccacaaatgaagacaagttcttggatttgtccgtcaacttgtaagcggataatataaaaagagagacgaactgatgtcgagcaattcgaacatgaaataaccatgataccattgctcctgtcaggataatattcgccggcctaagattcccaccaaattcgaaggtaattagtcaatgtcatcatcagagctatcaggttgatcgggagagttgagtaaggcaatgcaactcacaattgaggcaacaaagttgcacctgagcaaatgattgggaaaacaattttatcgaatcctctgcttggatatttcttgtgtaggtaatacatcaacactggaaccgctactccgatgggaaagcctaggtacagcacccaatatttccccgaaaaaaatctatcggaatttaatcaaaagtcacagcgagatgccttgttagaatagtaaaacttaatcgcaaagaggaagccaacgtgagagtgcagagtagacctaccttctaggagcaacaagaccccaaataattgaagcagaataaaacacagccgcttgccgtccactccattggcccgtggcttgtttagattatcattaatgggacgtgaacatcagagatcgtcaaagtgactcaagtgtttcttttttacttacgatcgacatcggttccatccaagaacggtcgtttggcatcaatgacatgaaccaacgtgacactagataaatgacgaggttgggattcttaagaaattgtgttatatcgcatgtagggagaggcattcaaaataacatacgtactagttcaccaaggcaccaatgacctgagacataacaatgttccaaaaacacaacgctttaaacctgatgaaagagtatagattcttcataacagaaaattttacacacagtccctagtactcttcaagacataaaatagggccaaataaatccagaagttctcgatatctcgcagagaaagatatgatcacgtagcaaagaacttactgagttttgaacatatcccggtaagatacctttaagtacaatgcgatcctgacaccgaagaatcaatgagaccaagtgcggacatcctagaagctacggacaaaagaaacgcacttgaggtcacttgtcaaatttaaggcttgcgacatagccatataaccgaagcatttactatacaacaatgcaaaaactgggttaggatatatacctattggtatgttcaaacgactgataaaccggaactaacaaaaagacattccctaagaattatcaagatttgagaatgttaattgagcaagtccagcaagttgtgattatgagtgcggaagcaatatgacaaagaagaatgatagaccaaccaacgggctttccaggctgaagcagcccatgacagaattcagtaagcacattcagaccgatggtttggccgctgacagcagagacaattccgattggaactacgaaaatctacgagactcgtgtaacctcttcagaaaaaactatgttccatgtaggattattctagaggagtcgcaactaaccacagcaatcccgagagcaagtaaaagtaaccaaagcggagtctgataacacatatattggtgtgggttagccttgccgttagagtctaaagacggatttagggaaatcactgatacctggaagacagggtaagtgagaaccaaggtagcggatgctataaagttcaccacaatcatggcgatataccagctttgtgggactgaaggatatgcacgcactactccgggcaattatatttgttatgattacagataacagattatgataagaatcatttaggttgtctagattgaagctgaccagtgaaagagcggtatttgcttactgagtcgattatgaatgtcatctctgcctgcaccacttggagatcctcgtttactccaagcgtctgctatttcatgtccgtagaacagatagacatgggtaaggatgctcgaaagcgacgcaaaagaaaatgcataagacagcgcaaagtatggggtgagtaacagcggctgagaagtttcccagacagtggtattgagttctaaggagggggtcaggagtgaggtgacgttgaatctgaaggtaacggtggaggaatataaaacacatgaagccgatcagacgtcgatttgatgctcaagacttattctaacagaaaaaggatatggctctgaccttgtgaaactggatgtgaataacccggctgagaccggagaggagaaattttgagcgtccctggcagtcgttaaattgcaaggctgatctctcgtcagatttgatccattactgatgaaaagatacatagttccttaccaaaaattagtgaaccacatgattggaacaattatccaggccatccccatcagccccccgaagtaattgagaaggctgaaccaaggggtgtacagtggcgaagtagctcctatcgacgaccaatctagcgaaaaatctacagcaacaatacatgtcaaatacgaatgatttaggccgaaagcgcacgtcagcagcaactaaccaagaaggccaattccctcatagcccgacccaagcattcggaggacccgtgtcgttgggttggacaacaaacacagcatgggaagcgaattgagagtaggaaaaaggaaggcagggaggaactgatgacaaaaccaccaactattaggccgccgctgtatctaaaacaataattgcgagagaacaaccgttacctgatacatgaatgtacaacctaagacgaccatgaaaaagttcagtcgggaggttgtcaagttggattttgagtgaagggtgtgatacagagacacgagcacgagggaatttggccaataacatgatggggctagccgaacagaaggtatgatatataccgttagctaacgaaccgactgatgaagtatgtgttgaggaatactaaattgctcgacagccagcgtaacaagctcgaagatagaactgaaatcgcatgtcttacgttccacgagaatcttcatgagtaaaccgctgaggccaaatccaatgagttgggtcgtcaacagcagagtggtgccagcgacagctccaacttccgttttatagtaaagagacaagatggccaagatgtcagaagcgtacgcagcggaacctcccgatgctgctaatacgccaactgagaagagatgatagcttatcgtgattaatctgataaccctgatgattgtgaaaaggagaaacttgatacagacttagaagatgttcctttatgttgaaagggccagggttgagggaaaagcccataagctttttccgagggaggtaggcggccatgaattttcctagaggatgactggcttgtgcgataagcgcataaatgaacgcgacgtcagattaagccaatacgcataggttagaacgcaaatgtacctaagatcacgaagtatgaagagaaagaaggtggattgcttttgaaatctgttgtcgttcgaggtatgaattgtgtgagattacttgcctctctcagatctgtacactaaaccgagaaaatgtttcttacagaacaactgggatgaagcggctcctagaatacagaacaccgacccaagaataaggactctgattgtcaacgcaggcaacgaaggatcgtccgtcgaaggcacgacctgaagaggatttagtgaacatcagaaaggggcagagaagattagtcgagacgatatgtagaatatgagtcagatgtgggaaatactcactttgctaatgagatcttctatgctttcgtctacattttttgtttcgtatgaacgctcctctgtaggacgtgattcctcatctcctccagaatcgtccaacggaagcattctgatcgattctccaacattgtcgacatcatcatcgtcgacttcttcttttccctcctggtccgttgaacgtagctcatctagacttggacaagatcgcacacgttcgtacattgtatgatagccggtctatccctaggttgcatctgttgcgattgatgaaatcaactgagatggaatggattgaatatgatgtgtggctgaaacagcacgtgtcacagctgtatgtcagtgtctgtcagggatgtaacctgagttacactcttgtcaaagatacgggttaagtatcatgtgtccccaagggtgggttacccttacaggctgttctttacatcaacctccgatgctttttgtctgtttaacagcatgcgctagtttctaaggttcatgcttcattctcttgaattctcgtgatctcgagcctctctaggttcgtcatatgtatatctttagtggcagaccaaatgcgcgaggggtcctgatatataacgaggacactatcgcgccttcttggataagagtttttctcaagctgagattcttgtcgaaatctcttatcccaagtacattgttaatagtctggtctgtttcagtcatcctaatcgccacagagtctaagtgccatctcgtgaaccaagcgattacacttggttacattctcaaacaccgagccttataccttacacgtatgcctgacatatccctgacaccttctctagatggtgacaccgcacgtactgggtcatcacgtgcctatcttgaaaaggggcacgcatgctgaaactcgtcacattcgtttcaatcctattctctgcctattcatcatatccttaacaacatcgctagaaattctgaacatatctgatggctcaacaacatgctgaaatcaatcaggccacattgaagcctagaccagtcgtcaaaccaaccaattcagtcacttttcaaactcagctagtcagggccaggatagacccaaccctccgttcgtaagaactttctgtctccccagctagacgtcacattaagcctaacacatacatcctatcataaccctgaatctatctctagctgtatctgacgttgttcgtcagctgtgtctttctttcggagtcaccgatcctccgtcctactgggaacttcgcgccaatgaaaacggcgagctccttacagatgaatccctctttcgtttcgttagggacaacatatctctcggtttgcttccctctacgctctctcaggttcaggcactcagggagacaattctatccgttgacactccttcaccagcattgaagcttgcactctttcagcttcaaaaacgtgtcaaagatccaaaattcgccgagacctttgtcgatcagggtgggctaaaggatattgtcagttcaataggtcaattggaggggaacaccttggcatatgctctgggcgcaatagagggtcttttggagttcacgtgcaaaaatgaacaggggaatcctgtggtagacagccaagtcatattgtgccacggttttgttcagatggtaggctcttgtatcaatctcttaacaagctgttcaaagctaacatctttgacgatcagatcacgggagttgtatcttcaagatcttctcccataaatatcactcgatcagcgacctctatccttcgatatcttgttcctataaactttcaagtagtttatagctctactcaatctcaccctctgcttatggatagagtagttgagaggctgaaaagcgaagaaggaggagaggtcttgcataggtaggtgaaatactccaatctgttttgatcatctactattgagtttcattcatataagcgctgcttactcttttgcacctcaagtttgctcctcatcaactccttgataagtatttcctcggaagggactaaaacatctgagattttgacagatctagataaacatgagatccaatcaataattgaagtaagtgctcgcccataacaggtactcaaataatttaaaactggctctgactacaagtatttttaatctttaaggatctaatgaaccgaccatgcggcgatgagatgagaaaagcgctactgggatatcgatgtacgccatgtagtcatcttacgaaccttggccaaacagctcatcatgacggattgtctttcattgcttgtgacctcagttaatatcgcctatgctatatcaaaatcaagccagtcctttgttgatacaacttacaatctctctcatcgactgttactccttcacatatgggactcgaccggcttaaccgatgtagagctcaaagtttggagtaaagacatcgttagaacaaagctcatatcggacgaggaagaactgaagtggtcagtcttaggactggacgtgtctcatagcgcaggtaggaacaaagtcatttggaagacaggaaagctaggtttggactatctggtacatcgatttgagctagtcatatcaatagaaaaaattcggagaagtacgttctctgacttgtctattgccatttcgtatatgacagcattggtttgctacaaacgatcgagcagcattcgcttcagtgggtacattggtcttcattctacctggccaatctcatatagtgtttgctaacagtattcggtcatatacagctcattcataagcaacttcgtgccaagccctcagagcgctgcccgattggccaagctaggtttgttctcctccaaactagcgcatctccactcttactaaactctgactagcttctcttatcgaaaaaagcaacgaaacacttgatcatctcctcgctcaattctccatccatgatatatcacccggtcaaaccatcacttcgttcgttcttcaattacgacatatctattctcttgcgctacaatttttccttcgaatgtgggaagaatcaaattcgatggtcgacgaaagagggggagaagatgattttcgacgggttagtgaggtcgtcaaattctggatcaaggagatcttcacggtaggcgcacagacaccgatgattcagagttcaggtcttcagagagcgaaaggaaaagactatagttgggtcgagaaaatgtttagagagtcagagtggagtgaattgagatcgaaaatgaggcaagttggtgaagaggagcgagaggtgttagacaatattgctatcaggtatttatcaatctcttcagattacgcccagtagtactttcaatgatacttcttggctaatttcatttcattttgatgatcgtcaacagagatttgacatcatcaagtcaatatcatcttctttttcattgttccgatgacacgctatgctcataaaatctcacttaacaccatcagttcttgagcagtgccagaatttcgtccaagagcagcgtatcaactgtctattgtaagtttccgcatttaagtatcatttgactgtgatttgtgtctaaaaaaccctctatctaatgtaaaatttcacgacatgtatatatacactcattgacaaatggccttcagggaaggagcgtggttcaagcacggagcactgaccggtccttacttccgagaacctactcgggatgttcccagaggatggacatttgtgcgcttggtacgatttctatatcttgatgtccctcctaccatgcatcggatatcatgctaacaaaagatatgatatggatgtgatacggcaggcaccgaacaagcatttcttagcttattgcgaaactcaacatcaattctcggctaagcccacgattgatgagctctccgaacgaagtacgtttcatttaataagaaaacgcttcttcgaaccggatggctgaacatgacaaacccatttggcttctctaaaacacagttgaccttaatcttgtccatgagatcgccactaagacggcatatccgatcatcagcgaaaccttcgatttggataacgggtcctcaaaaatagaaatttcgaagaggaccgtccctagcgatctcagtttctctttgcttgttggaaaaggaatctctgttttggagtctgtgtggttttcttcttacatgaacatggatggtctaatcaactgatgtctttcttcgtttctcctatacttcatttaacttctgtagcttggtggcgttgaaccgagctcagttttccgagtggacagatggcatcgggtaccttttgggacgttcccctccgactcagactcaggaaacgatggaattgatcaagcatctgactgaagtcgggctgaaggtttgttcaatatgttggatttttcttggcgtcctcaataacggatcaaaaattagattaaatgactgacggttcgaatctttccaaacgatgaaacactaagttgaggttgctggatatcacaggcgaagaggtcgaagtcccggatgaattgccaatcccagctcctccgagcaactacaacttcgttagtattggcataccggggatacctgaacgacctcatgacctaactaatacctgtcatttttgtagtactttgcggatccgatgtagctaatctgtcattctgttgaatctcgtaattgtatccatatcttatctatcactgttatcgctattatataccaagttattccgcatactaagtatctacccatacttagcttggttcttggccaatgctgaaaactatcatgaaaccttcctttgtttgcttgcttgctttggattgagttatgtccgagagaaagcttcaattgaggggcacatgggtattttgagaggggcgattgttgatcggttcgagggggtctaaagaacaggagaaacacttcagtactcaaacaaaggattgatacttcgttagacaaggcgtacatattattttctgaacaaaagtagaaggagagtcgtcttcatcgatgtcgtcgcggccgttcccattttgttgatctcgatagcccatatgacaaactccgcacgtggtttttagtgtttgtgaaaaaaagccgacgaatatcaatctgaacgcggacgcaaaatgagattatctcttccaatcgaagatcgtagtaagaacagctgccaaagcaatagcagccttagttaaacacattagatcgggaggatttgaggtcagtacaacgtgatgttcgtgcaaatgataccaagggaaaagggaggactcacgactgctaagcaacttcctgaaatctgctcggtgaaccatttacaaacgtcagtcattgatgtacatcgctcttctgatatacaaacaagcctgaagtgtacggacggcaaagagttctccatttgagaagggttcgaaagagcggttgcttccgtggttcgagagtcctgaagccatattgatgtaggtgatagtagcagtgatggtgacgataatagttataaatcgattaaggggcgcagtacatctgtccatttgagctcatctcacttcgtttcttctcgttcctctctctctctcctcttccatttaccatcacaatctttatctaggatgtctcaacagcaaacagttccttgtcaagtaagggtcgcctcttaccacggttgctcttgacatcacttgggacaaggcattgctaaatttaagactgatccatctcgttttagtataaaaccggaaagaccctcgggtcaggaacttatgctatcgtcaaggtgggtgcttatttgtcttcaagtttgccaaacggatagcattctctaatgataggcaactgttatctttggtcaaatgacgcatcggtcgtatccaggaagccgtccatatcgtcactggaaaggttgggcctctttctctcgagtagttctacaattgattgctgtggaatctccatcagttccaggacgtctaaagccgcaattctctttaccattggtcttgatcttgagaacaaacttgctgacacgtgaggtttatctaattcactcactgtatgtagtactacgcttgcaaggtatgtttatcatttacgctactcgtcaaatttggtcagatcgtccatgtataacgcctaacctcgctcaagtatcctttctcagatcatctcgaagaaggtctgtatcacaatcactttgcaatacattcttcaacagacttgaaaggtacttgcttatcttttgtattgcatattgtttttgttgaaataacagcttatggaaggtcgagagcatatggtgagttctttgatcgaaccgcaaatgactgttctcatgctaaagttctttcattgcacgcacaaggttcgcaatgaaatcgaggtcttgaagcgagtctcccaaggacaccccaacgtgcgtgacagattctttacagtactgcccatggagttcaaaggttgatagagagccggaaggccacgtatattgtatctttcactaatgaagattgtcggcctaatcgattatttcgagacccgaagcaatctctaccttgtattcgattgttagtaattcggttcgttgctatatatgtatagattgaggttggctaatctcggtggttcgacttctacatagtatgcaccggaggcgaactctttgatcgaatttgcgccaaaggaagctactacgaacggtcagttctctggtttcaatctgaccagaaaccaacatcatggtatcgaggctgatgccttctagtcaatttatttgacaaagtgatgctgcccatctagtttacgttgtgacgtctgccgtcaaatacctgcacaacgttgggattgtacaccgaggtatgtctgtcgaagtcctagcttctcgtatacaaagcgtgatgctcatgtgttgtgacccgcaatctcctctttccgcacccttagatctaaagcctgagaatctaatctttgctgacaaatcagaagagtcggatctgttgattgctgattttggtttgagtcgaataatgaaagaagagcaattcaatctgttgacgaccacgtgtggaacgccaggtgtggatccatttacattacgttggatttgattcattccaaaacatgttgcgcaatctggtggtactgatcttagtgtggatatggaattttgtcaggttatatggctccagaaatcttcaaaaagtccggacacggaaagcctgttgatgtaagttccgagtttgacacgctcttgcgattttgagaagatagtgaatttaactcattcactactctcttcaatgcggctcaagatatgggccatcggagtgatttcctagtaaggtttccctcaaaaagattgttaatttgtttcatcagcgctgactatcaacgttgtctgattatgacccgattcttcattagtttcttgtccgtccctgtcttgtcttaatgacgcgttcctagagagcatttataagcgatgtatcgttgagttgttgtattgttcctttttcaacaggttggccgggtatactccatttgatcgaaactcacagaccgaagagatgcaagctatcattcgagcagacttcagctttactccggccgaatagttagtctcatctacattctcttgccctttcgatggccgaaacctcagtctcaatactgtcctttgattgattctattcaacttaccatggtcatgatgaatagctggtccggtgtgtccgatgtggcgaaggacttcatcaaaaagtgtctgacagtcgatccggcacaacgactaacggccgaacaagctcttgagcatccttggttgagccaagaggctaagttgcacgtggccgatacatcggcggtcgatttattgccgagtacgttgtgcccatctgtgtctcggtaaagaggataaaagtgactaataaccatattttccgctgccgtccccttattcagatgtcaagagcaacatcaccatgaagcgaacgcgtgagctgattcggcatctttctctttaaaaactggacatatcgattgatcatcactcttgtttcggagttcatatcaactctagtcagaggtaccgtcaaagctatgatctttgcccagcgattgagcgctactcaggatcctgttgcacaagagatgcgaaccaggctcgattcgtacaaacgggaagccgaagaggtacgttgcttgatcactgtcctccgaagagaaatctcagctgatgtacatctcttcgcctctactctgatatacaggacgatcccagccaagtcctaaagcctcaatctgcttcggtctagttgactcttctttccgaataattcttttatttccctatatctcctcttgttttcggcaatgtttttttcatctgctttgtttcttcattccttgggtcgtctatcttttggtatatgatatgagagaacaaaaatttcaaaagaaatgttcaagtaacaggagctgaccctgaatataattggaatcagggcgtaaggaaagctctggcggacaaggccagaaaatgatcatctttctatgcgaccatcccgcatcccattcttgataatcagatcagccctctctcctccattataccttctcagcccccgagtagcaagcgtttgtattccaaggtcacatccaatcgtctacggtcaacgaagaaatatggcctccaatactgttttacccccagctgcagacgctcctccagctaccgttcctccctcgaagcaagagaccaacacggccgatcctaatactgccgtggatgttaaagttattaccgaaggagtaaagcaagcaaagattggaaaacagcagggagaaaagaaggctaagaaggagaaggctggcggatctggatccaaggaggttcgttcaagcttcatctcgactcttcctctctgtagatttttctctctctcttttcctctgggtacaacacgtcgtcgggatggcatgttccggctggctggctggctggctgtttcgagtcattctcggtggagattattgaagaactggcatgacaaatgtgtagagaaggttgtcgttctcaaatccgagtcatatgtctttctgcacactcttgacacactctgagctttcgttttgctgtaaagctgataatctaatttcaataattacgatagctcgaccctccaaacttcttcattggtccgcgaatggatttattcgagaaatggaagaagattcaggccgatcgaatcgcccgttcgtatttcgtttttgaacattacatcagactcgagaagttgtgttaagggttttctgatgatgttggaaatacgatcaaccgtaatgcaattgatgtacacagaggagcctcgagttcccataaccatcacccttcccgatggttccacccgccagggaacttcctgggagactactccattcgctattgcttccgacattgcgaaatctttgtctgagaaggttgtcgtcgccaaggttgacggtaacctttgggatcttacccggccgcttgagaaggattgcagccttcagcttatggactttgacgaccctaccggtgaagcgaaggctgttttctggcattctagcgctcacgtactgggagagacttgcgagaagcacctgccgggctgctgcctcggccacggacctcctatcgatgacggtttcttctacgatatgaaagtcgagaatgaccagtacgttggatttcagtttccatctattctctttcttaacaaaattgaatcagtgttatgcgcaagttaaatattaatactcgcaatacaccattaatctacatctcattcaggcctatcttgcctgctgactggcccgctttcgaaactacttttaagggtgccgttaaagagaagcaggctttcgaacgagtcgaaatgcctaaggaggccctcttggagatgttccacgtacgtttggttcttgtttcccatcaaatctcttgactgatacgaattgcatttggctatcattcaactatgtagtacaacaaatacaagtcccatttcatccaaactcaagttcctgatgggacctcttccactgtataccgatgtggtacgtcacgaaacatgcatatcaactctcttctctatttgagtctaacccttccctcttccgatttggaatttcgcttctttataggacctttgatcgatttctgtttgggacctcatattcctcacaccggtaagatcaaagccttctcggtcaccaaggcttcgtccgcctatttcttgggagatgccaagagcgattctctccagcgggtatacggaatcagtttcccggacagtaagcagatgactgagtacaagaaatggctcgaagaggctgagaagagaaaccacaagaagattggaaaggtatgtgcatttgtaattacaaagtcacaagaatgggttgctcacgaacaactcttggatggcgtctgccacccaccaggaccaggagttgttcaccttccatgaattaagtcccggaagcccgatcttccttcctcatggggttcgaatttacaacgctcttatggatctcattcgagaagagtaccgagaccgaaactaccaggagggtaagctcttatatagcagatatagagttttaagcgtctgtaatcaacagatatctagctaacctcgattcatcttcgacatacagttatctctcccaacatgttcaacgtcgatttatggaaacagtccggtcattacgccaattacaaggacgacatgttcctacttaacgtggacaaggaagagtttgctcttaagccgatgaactgccctggtcactgtctcatttttgactctcgaaaccgatcacacaaggagcttcccctccggatggctgagttcggagttcttcacagaaacgagtccagtggaagtctttctggtttgactcgagttcgacgattcgttcaggatgatgctcatatcttttgcactcctgatcaggtatgttactcaactttcaagcattgttgtgaaacacattgtacaagacttttgcagttactgatctcttcagttgtcttttctcattgttcctccgtgttatataattgtagattgagtctgaaattgcaaaccttttcgagttcattcacaaattttacaaccagtttgacatgaagcttaaattccgactctccactcgaaacccgaataagtatatgggagaccttgatgtctgggagaaggctgaggacactctgcggcgacagcttgaaaagttccagcctggagcctgggagattgctccagaagatgccgccgtaagcgatcgtctctgattatgcatcatcatcgagattagggagaaactaattaaaatcggcgtttgccttttgttctcatttatgtagttctacggacccaagattgatattgcctgcgctgacgctctgagacgggaacaccaagtcgcgactattcagcttgatttccagttgcccgagaagttcaagctcaagtattctgccggtgccggtggagagacctctcaggaggcgagacctgtcatggtatgcttttttttcccgcaattatattctgtttgacagtcaaagacatccctttttctttaacgtattcttaacgcgatgaattctgtaataatcgacatttccagattcaccgagccgtgactggaagtttggagagattcattgctatcttgaccgagcatttggtcggcaagtggccgttctggctctcgccccgacagattatggttattcccgttggtgtgaagtacaacgattatgccaagcaggtctccaagcgactctggaaggagggattctactcggaggtcgatgagagtggagagaccttgaacaaaaagattcgaaatgccgaggtcgctcagtggaactttactttggtggtcggtgagaaggaggaggagagtctgtccgtcaacgtccgaaacagagatgacgtcggtcagaaacagcgatcggaggtggtcgttcctctagacgagttggtttccaagcttcgatctcttaagttcgataggcgaatggataaccgattagagtagaggagctataagctccctcatctatcaaggatggcgagaagaagcgaaaagaaggagaagtagaagtagaagtagaagtagaaagggaaggattgaaagggtacgcagagaggtactctggttttttcctcttcagtcgagatgtttgtcagaaatggatttatgtgcctttggagtcaaaactgagttgtttacgtcggaggaaagtccgatcgagggacgaacaccttgtcaagtacatggcgggagacacaagtattatattccataaacatatataaccaatccagtttacaatcaaaaatgttgagaacgtgttcatcaagaaccctagagagtacgctataaacctaatgagacccaatcgacctgaccttcatttgtcgttgtgtatcctaatccgtcgttgaaatgaatcgatccttcttgcggctgcggatgctgatgccgatgctgatgctgagagtgttggggatgggtatgagattgattgtgatagccttcgaccggtcccagatctgacattgagtatccctgtccatgtgtcaattctgtcatattcgcactattacctcgatgatagactttttcgtccacgttcggaaagaccggtttgttggaatgttgttggtcgataccatgacgagaggtgaacgaagacggcgttgcgaatggagggggcgtgtttgaagtaggaaaggtgttgtccagatgagtgacattcaagacttgtcgaaggtactgatccaagtcgaacgagtttggtaaagtatctggcgtgggagatacctcgggtggggctgatgctggcaacgattggttggacgaagcaatagaagatgatgaacgagacgacggatggatgggtgagtctttcgataacgagtagattgatcgagaatgactctcagacggcgaacatcgattatcggcatagatgtttgtcgaaggtcgcaagtgagctagcttatcaggcgcgtttgaagttgtctgctcagttggtgacgtaggagtgaaagttgagtggttgaggttcgtagtatcagattgagacgcgatcgaggccaggatcgcgttaaaatccgtggagtaactgggagggtctatggatatattccccgtgctggctgcgaacaccatagaaggtgttggctcatgttgctgctgagttgacggctgaactaggttgaagttatgccctgtatttcccaaagtagccgctatggctagctccaaatccaaattaaactcaaacccgcatagaacatccaacccagactcgtctttttgaacgctaccgctctggtcgatcaactcattgccggttgcagacgacatgaaatctgacttgctgctagtttcagattcacctttaaatccagtgggctgatgcatacctggaaacatcgccgggtgatacatcgatagtctatgcgagtgatcgagtgaggagtgatttgtgtgtaacgggttcgagatcgatgaggatggtgtcgagcttgacagtgccctcccagacgagttggtcacttcttcgctgagagataagggttgattctcatacgcgtcgattgtcttcaagttcttttttgagcaacaacccccactatcttctgtctccagtttaacctgagaagacggcaggatactcgaaggagttgttgcgcattgagtttcggaacaacgagacgactgtcctgtcgacgtaggaaccgagtgacctgcaagagatgaagtgaatgagggtcgcatagtagaagatgcgaagggcatgatagatgtttgatccgtcatagcactgcggctcgatgaatgatcgttgatctcgtctggttttataggcgatgagagtgtggcagtcgtttggtgggctagactattgctttcgggtttgaatgaagcctcgaggcctgatgctgtgccttcacagaggcacttctcgcactgtacaatgaagtcgcgaaagaggagatcagtccccgggtagaagtgtttataaatcgaatcgagatacgcacacaaccacaacagtccttcatacagctacattcccccggcggacattggcactgtccatcacagcattccgttaagggttttttctctgatgcaaatgcatcttcgctgaattgggtattattaggcgtcgagattgtgtcaacagatctgagcatgaactgagaattggacgggtttgatggaggtagcatcgcgacagaagcagaaaacagatctgcaactgtcgtcagatttgcaggaagtgcaacagacgaggaacaattgaaacatctgcagacatgaaccgacgagcatttggaaaagtcagaagattgaaggaatggacatgagtacgaagacaacaggttatagccaatccaggaagctagcttacgatgaacatgtctccggacaatccacgtgggattcattatccacgtcctccggatgattcccatgctccttacaacttgggcatttacaatccttgccgcaagtacacgtgctcaccatcaacacatctccgatcgcgtcttcatatatcgctgacagactaggcaagccttcgacctccggatttatgtcagaacctgatgtccgatctccaccggccattctgtgacaggaagattcgttgttctccttgccgagcaggagtgatacggacgaggtctcctttcgagcacggacatagtttcctacgagttctttcagaccccgtctaagaatctcctctggactcgccaccctagaggctgaggatattgattctgcagaattccgtacttgaagccgattcacagaatgggatgatgactgaggatagggcgtgtaatatgatgcccgtgatagataattcggaagcggtctattggctagctgaccagatgacgaatacctggaagaagacgaagatggcgtatggttggaagacgaggaagcaataggctcatgtgttgctaacggtgaggggaagtaatctgcaaacggagcaggtagggtcatcggtgtaagcggtaagttggagtatgtggagagagcaggtgaagacgatgtggatggtgtggatggaagattgggttcatgagatgttggaggcgaaaacacagaggaacaacatccactgcctgagcctgaactagagttgagtgtcgacccactagggttgatactagaactatcgtttctggccacatgcttctctgtgaaacaatgacattcaccgccgactgaggaaaaagaagaatggatgtaaacttcacgaacagcagccggcgatgagtatgaagaattgagatatacctcgacataaacactgtttggctattgctttcactagaaaagtgcatatgacgtattggacagataaatccacgagtcaacatgatggatgtgtcttgggaacacataaagacattacactgacttctagcttttccctttcccagagagttgggaatggtcgactcatcttcctccttcttcagtccgccaacagaagacaaattttggacatcctttagcccgtttggaagagcaggagctgttaaagtgacatctttcttcttcttctttgcctgtcctttacccttggcggaactgacaactgattttaagagccagaagagacactatcagctataagcatacgccggtgaatgtaaaagatgaacacactgctggtggaggatccctcggcgatctgtgaaggatccaatatcaacggaccacgagcctcgcacatgcactttacatggacctgtttcttctttcgaaggtctcgacagtggctgcactgtgtcggcggtcgacctttcttcttgatctcgaacagtggacgatcggtgtgggcgcatgaggacgaacggtgacctacgaagagaaggagaaaagggagaagagtgtttacagacatgatcaatcgactgcaatacacgtccacactagacataactcaggaaacgttccggccagatagacaaatgagacgtacctttgatgcaagcttgactatatgatacaaagcatgaccacagtcaagatttcgatcagttgaattgagttcctcgataagcttgttgttctagccaagagagcaatccagtcacatcgtagaattggaagcgtaccatgcatatttgatctgtgccgatcataccgaggagtcaaccgaatataagcttagataacaacgtttcactggtttcccgaacaaacaaaagtcgacaagaagcaagaagactcacgtcgtttatgagctgcgagtgtaccaacaagagggcaaacagatagagaacagtcactcaagaggcccaggacttcctatcacgaagaaaagacaggttggagacttaccaccatcttgaatgcgagacccggctgttgagggaatatcgactttgtctttcgagcaatattctccagaagtccgaggcgaagtgtccgatcgctaagaatggaatcaaaaagagggatatagaatgatagataaggtggatatcttgaatgggaaaactttcctagtcatgcagacgtgacaaggatggaggacggagcagacaatatggagaagtatcttaccaagagtggtat

SEQ ID NO: 3102 - DNA, 834 bp, Xanthophyllomyces dendrorhous
aaaaaaaacttgtttacctggaagatggcccaaagaacccaggagatggtgagggctcctccaagatcaccctctcgagagctgaaggctatttgatttcatagggttattatcgtcagatgttgaattgacggcgataccaaaacgattgataaatgtgacgaaccatatccgacagcagaggtctcgaggaaaaacctgttgtaggaacggaagggcaggagttgaacatgaaaccaacaaatcttgtatttgaggacagtgatgtgtttgaaatatatataaaatgtgcttacaaggcaaggaagacaaagaccttggttccaacgcctgcatgatggtgagcctctcgtccaaaagcctggaaaccagagaggacgacaagaacgagagcccaagcatggtacaaagaatagggaaggtgaacgaaaagctcgtcatagacattaccacctcggtggttgacccggacggtgtagtagatggatgagacagtggcagaaacgcttttcgtcgaagcagaaagacatgagctcacaacttttggagagaatatcacatgaactggactcacagaatcgagaagatgaaagcggtgatataccatcctcgaactccgaagaaactgtacagcgaggtcaatgcgccaagcaaggcaaatcggattccgatgttgtcgatgatgacctcctttccggcatcagctgaatgaatgaccgacaatgacgttgatcagtatatgctgccttaacttgaccaaacgggtttctatgaatcatggtgatactcactccactggtagatgatgtatccgagcaacaagaggtggatcag

SEQ ID NO: 3103 - DNA, 5655 bp, Xanthophyllomyces dendrorhous
gccaatcaaagggaaaagagaaggagactgtcagaagagatggctttttttttttaattaaaagaagaaaaagaggagaaggcaagagatattgtccagaatacaatatcccttccaaaatgagcttaccagatgtagaaagcgtaagcagcaggcgtgatgaaagtctcctttcctggctctcccgagaaagtgtagacattcgcaccgagattgacaatgtagacgagggtgttcaacacctatcatggacaggaacacatgcacggggcagaaaaagaaacagtaatgtggaatagatttcgatcagacgggatagaggctttcaatccaatgaacagaacagaaactaccttgaggagaagaccgtcagaaagagccatgttgagtaggtaggctgatgtgaggaggcgagataatggtggttgagagatgaatgtgcaatagaaagaggacgaagaagtagggcctatcaaatccccatggcgtatgaatttagtttgcccccgtcattgggacattgtcagccatagcatcagtctcagtgtcagcctgagcctcggtgacagtgacatcatcagcggcagtcatgtcgaacactaacattctcgccccctcattctcttctaggtgtagggctggacggactatgtagcgcgacgcaatacaatccctgttccgccaagtgtaagaacaaggagagagagcggagaagatgatcagtactcggcacgcctcgctgggacgctgtcatgagaaatgcaacaggcattcagcataggcgaatcccccggcatacgtttcaacactctttgatcgcccacgttctgctcctgctcgagaactcgccatggcacttggaacacactttcgacgtctagagctcacagatcttgcgaacccggagcaacgagaacgctttcagcttaaaagatagcgtctccacagggcctgaggtatgcacgcgaaaagatgagaaggaggcgccgttcccgaatgcccggaaggtacctggacgtcctttcaacagacgaaatgccagcttgtggtatccctgctcgctcatgatgtgtgcacatcagcggagacgtctccactctcgggcggcgtaaaatgtcgagatccaaggctaggaatgagaatgtgaggcgagagtagcgcggagataaacgagataggcaattccaaacgaaagaagatctgttggaagaaaccagagagaggcaatggggtaagagaggcaatctacagtgtcagtctggcagttttcacagtcagcgtgagtctgagagtgagagatacttatcacggagatctgttgacacttttacgatgtttttttatccacagctgctgtttccgagcgtctctgtttatcctcgcgaggtgcctctatggcttgaaagaaaatgactactgcgtgccatgttcaaccagaccgctagtgttcagagacatgtcgagccctcccgcggtcatcgagagaagcttccgacaacccgggtgagcagaactcctgaaagcaaaggcaactggtgagtttttcaatgcggaaacttgtcctcatcaccccgacttcattttatccttttaccagctgtcgggattgatgcctgcttctttgcagaaaatcttcttggtcggttcggctgttgaaggtcatgatgagtgacctgatcaagactctacaactcatgtacaaagcaatgaacaggcaaagagaagaggagataaaggaataaagatgattttctcaatatagacacgtgcagctgatctctgcaggcttcgtatggacctcaatatcaggtacacaacatgatctttcgcatgtatatgatagtaaggctcaagcttgatgagaacagaagataagaaattaaagagcggatgaagcaacagcttgtgggtagtgatacaagcgcaagaacacgggttactcaacctgcatccacgacgattagtgctatcgcagaatgatgtatatgttaaatacatcaaatcgctccctcgtccccagcaaaccgaacgtccgcattctcttctagccagatcatccagtctttcaagtacgagcttccgttgctgactgttcccgaatctcctatgactacaaattgccgttttgccctggtcatcgacacgttgatccgtcgttcgtctgacagaaaaccgacctctctctaaagatgcgtcacagagccgatcagcccatttgatgacgcgcgtgttcttccttatcacgcaaagaactataaagcttaccttttcgttactccgaacaagacttaagattacaacctctcgctcttgtccctgcagcgagtccactgtgccaatcaacaaatttggatattctgttttgagaagactcgaaagaagggaaacctgagcctgataagctgctagtatgccaatatcctcaggcccaacaccaagtgtgatctggttactcaacagaggagagatttcaaattatgtgatgcaaatgaattcatcatcaaagactgttctatagactgaccaaaagtgaagtctcatacgcacaagtctcctgacgtagcgctgcacgagatcggcctcattctcattcaacttgcttccttctccgtccgaggactttccattccctgatccatcatctcgttcatagaactcacatccgttgctatcaaagaacacaacaggatgatccaaaaattcgacgtcgtcctctgataggtctggtaagtttggaagcgaagagagcgttcgattggaaacagattgatgcgaaaccaaaagagatgaatatagtgctttagatgcatattcagcgatacgatgattcattctgatatgccgaaaagtgaaacatcagtccacagtttgaagtcttgaggaatatccgaaacgggacgaacctgtattgaacagtcaatatcttcttaattcctggtccataaagattttccagcctcataaacaacgttgttgccaatgagcgcaaaggtttcaactcagtctcctggatctcagttgcagttgattcagtcaagtttttgacgagctcctgatctggatgaatctcaagttcgtctatctcctcttccttgtcatcattcaaagacgttccatgcagatcaagtttggccgctttaccctctagtgtgatttggttgccctctttgctcagatcggtcctggtcttctttttgggtgcttggtcggtctgcttcacaatctttcgatgagttgtttctgagagtacagtcggtcccaactgacaggggtctcctgccagaatcaacttctttgcttttagaatagggattagacaaacagcctctagcgcttgtgttgcctacaacaaatgagtgtattgatcagagatcgttcgctgaagatcgaacaaatcaagggatgaaacctaacaaacctcgtcgatgatgactacatcaaagtcttgaccgaacagctgcctcgatccggctgtatgacaagtggcaagcacaatctagaaaacgagcatgagatcgaacggcatgcatcaggtgctgctgtacgatggatgcagaacaatgtagacgacaattgagcccacctctgttgtagaaagcacgttccgaacgacacctgcttctcttttccggaatctgccatcatgtgtttatgtcagtcaaccttcagatttggcagacatgtgctgcatcagactgactcttttcgcagctctctgacatcgctatacatcgcgaatctctcctttccttttacgcttcctttttcttttcgacccttagagagtctgtctagatgaccatctagttccttcttgacatccttgaccacttcgccgctagatgaatgagcggtctgatagtccagcgtagtgggcaacaaaatagggaggatacgagcagggtgtccaattcgggttatggattggggcggaaagagcggtgacaatctgaggagcagattatctgatgccgatcatcaacaaagacgtaaatcagctgtgtataccaacacaacgatcgacgaatagtgcaagatgactaaccaactgagaggttagaagcgccgcaaacgagaacccgctttttttctactctgattaattgacggatgatttccacgagggtaaacgtcttgcccgttcctgggggtccatgaatgcaggccacctctacaagcatgaaaagagaaactatagtcagtggtcgttcaaattcatttgaggagtacctacagacgagatattcgatcagcaagacaaaccgttactctctaacgcaaaccgcacggcttctttctgactttgatttaaagactcatcaaacaaattgatttcgcctatcggagttgatgtgggaggagacagaccgaaactattatcgatgtcacaaaatgagaagaggaatcagattggtttagatcaagtgcgcggcgctgcataacctgtcaaaaagcttcaaagtggttcctacagtgttttgagtaatggaacagaattatattctggacgtggtccacgcacataattgctgaatggagaagttcgaaactcttgaactttctcgctcattcgctcatcgagctcatcctccgctccttctggagcgtttataggctgttctatcaagttttccccgatagtctgtgtagtggtgggcgcgttctccaacgtttcttcgctgaccgaattagaggatgaaacatcgattatgttggtagaagttgtagtttcagaaggggtaggtttgattgttgtatcagatgtagaggctggtccatctgcttggatgagccgcctgactttatctaaagctttccccatcctataaagatgaatcgaagacaaagatatatcagtatggaaatgaaacattggtcgggtaatttgaaggttcctacctatcgaaagttcctgtagcggcagtcttgatgctgtgtattggaccggaccaatattgaatcagatcagatcaaaatggtcaaattagacaacataactcgtattcactaacagtcgacatctttccggaatctctaaatcatcgccatctctaaccgacacggctaatatcacgatggtttccgttaccttgtaaatgattccttcaacttctttcccttcttcttctgcaggtttcttcgaagtcttgcccttccgaacggtctcttgaggaacgatcttggcgggatctccgtttcgaaacccatgagagggtaattttggatctgtatgaaaagcagaaggcctatgtaggctaactagactgttcgcacgcgatgtaagattataagaagtgtaagtacgaaagcaccatcctacttacccaagaggcaaaatgcaaaggggctaacgatttgcctcccaacccgatgttcacaccagataccccgagtcctactctcagccaaagtagccttctcaattcattagaacaaagtaattactgaatgaagcaaagaggtttgtagagaaggggcttgccattgattgctaatcctttttgtgcaagaacctcccatgagcaagaagtcgagagtaaagccgttcgggcttgatctgtttcgagctccttgtctagaagatgggacaaccggtcgaggtattgacctagtgttgcactcgaaggtggtcgaactttataaagactgggcaca

SEQ ID NO: 3104 - DNA, 5029 bp, Xanthophyllomyces dendrorhous
acaaaacaaggaatgagcctgtcgatcgagcctttttggaggacgaaaaaacagtaaaatacagagagaagagaccaacaaggagactcactgcgtgctaaaggagcttccagggatcatgacgattgagatatcagtgtgaagaaaaggaggaagaggattctttaaaagggagtgagagtgtatagtggccacaaggtggcaaaggaatgagggcgggtaaaggatcggatttgttaccatgacgacacagtaaagagatcttatctcgttcagaccatccagacttcaaacaagcatcaatccatccatccatccaacgtcaacggtcatgtcgtcaaatacaagtgcagaaacaagtctggatgaacaaaacaccgccttatttgttcaattccagtcctatgacttcgataacgacatagaattctcgacaaaagtacttcctttattgtcaaagttagaatcaaacgggatcgggacagatgtacaagatcttctgttgaaggctaaggcccgatatttatccaggtagttttcctatttgcatgcttgatttctatgcctgaaatatgtgtttgatcgcttatcatctcttttcaattagaaaacaaaatatcatcatcgatattccgacgtacaataactggctcgcatcaccccttgctgtgacctctgatataaccctaacacctgacaaggaaataactgctaatggaagtgacaacttctcaatcgtgacgccaaccgtccacaacttcatcgcgtctcccgttccttctgaaggtcaaccacccatagcgcctcttcctttgcaagagcttgctaaactgatcgcgcagggacgagtggatgaaatccctgtgttgcatgtcgaagagagattccacaccgttcgtgctttgccctcatatgtttaaatctcaaaaagtctcgaagcttacgcggatgattttcatactaaacccaaataggctccggaaaaaacagaagtcactgtgccagttctcaagccctgggaacgtgttcaaaagcagtcctgaccaggtatcgagaattctgtactgttgacagaacgaatgttgtaggtatgcgtacaaaacatatgaattaaagagaaagaacaaatggatcgaaaccagcgcaaaatcggatgacgaaaatcaacaagaaaagaggaaagaggtacgcatgtgagatcgaatgcagacagacaatgaaaagcaaaaaggagaggtgagatgtacgacccaaggccgatacctatctagttctcgggtatacggaagatcgtgatttctgaacgaattcaataatagcggcactgaatatgtcagcgattgcggagaagactcagtgtaatgatgtgcaagaattaagatacttgccgttttgtttgaaataccgtctattctcctcgtcaatcaaaactagatttaagaaatacctggctgaaaactttttgttgacatctctgaatgtcggtgtgagttcgaatcctccaaggaaaagtcggatgggaattgtttctcctaaatgaatgagtaaatgaagaggaatggcgaaacacatcaattacgcgtttgaggttatttgcgtccgtcttcacgtgtgaacgaacctctaacaggagctccgtccatgatctttgattagaaaagatccgcagacagaagaaagtagaataagtcactgattaggcaacacgagcagcgataagtagtatgaagaagtctagaattacctcaaatttggtgattgtctcgctttcattgtacagattagggggcgcgcctgtggtctccttccgaatgatagacagctccatgtgtttaattttgattcggaccagcaagaagtagatcttgccgacgatcacatctttgagatggtacctaacgtatccatcacgcaggtggatatattgtattcgatacgtcaggacccaaccacgctcgtgtcctttttctttcctatcattaatagagagagaaaaggataggacatactttgacttgttgtactcgaattcaatatgcagacaatcctcgattccaacttccatcttgatcgagttattcgagtccggtggcatcctgtatgagtgcacccaaatatctttctctttgacaacatccgccattcgtcgagagattgttactcgaaggaagtatctgatagcacgtaggtcaaatcttgtgttagtaaccttgtgtggttagttgaacgaggtgtatgtttcaagagaagacacgaagccaggacggacctcagcttgacattgatgccttggtaggactcgtactgcttttcgacgttcttgaaattgaagttgaatgtctgcgcctgacgcatctctcctggagaagcaagctcctgagacaacgataagaattcatagtgatttcctcgatcatagaacctaagaatggatgaaggaaagaaaaagtggtcagaattttgtatcgagtcgtttattgaactagcttagccataacgtacatttctagcagataagacgaagagatcgtgagagaagagagtatttcagatcaagctctcatttcagactaagactgggtattcatgaggctcacctatcgatccaacctgaagaacgtcggtcccaatcagtccatacacaaacccatgcgattagcctcgtttgaccaatgtgttatcctgataactccatcctgctatctatccgaccaatcccatacatctgtgttcgactaggggactcacaaactcgactttgatcccctcatgaatcagcttcttcccgtctttcactctgactgtgacctgcccgccaacggcttcgccatcgaagtatactggagagagttctttttcgtccttctcgagcttgatctcaacctgcttccgctcagattcggacgaaagtcggatgtcgacatctattggttgagcaaacgagaagaaagatgccatctgaatctcacgaggcgtatgcttgagctcaacaggtggtgaaaagctagagagaaggatgaagtaagaaagcacgaggaataatcaagatggaaggatcggtagatggccaaaagcgaagaacggccgctgagagaagccacgatgactgtcactcgtgtggcggtgttggctgcgcggaatgcacagcttccccaacttctaattacccatgttggtagtcagtacagtacattttatgtctggtgtacagtctatctatagatacagcggtggtatttctgcaactctgtacccgtccgtaactctgatcccactcttggttgagttactcctcctttctgacgattttctgagtgtctcgcgtctttgtcggtacgtttgcgcgagccgatttaggctttgggttcggctttgctcccggaccaggcttgaagtatccgtccaacgtattcttttgcccttgcgccttcctctccttttccttttctcttttgatcgcctcatcagatttgaccccaatctccatcacttccattaacactctaaattcttcgtctccgatgattcctccggatgcttctcgatgccctctggcataatccccaccaacgcgatctatccaaccgggacttacggcttcgcactgcggcttgtacgtattgaggatctcgatcagattcggggttgatgaatcagagggcgaagaagcagaggaagctttcgatttgggaactctgcatgaaaaatgtgtttttccaggagtatacaagtcgtttgtacactgtggcgggtatcgaagacagacaggagatgattaggcatctaaattcgcaaggatttcgtcaatatcttacttaaattggtcacgtaccatgaccaagacaaggtctttcgcagttttcaacgtcccagcccacctagtagcaatcagcggatggacttggtaaccactatggatagcgatcacggcgattcggccatctttgctgaattttggccctgcgctctgccagcgagcggtctcggctgtcgtgcgggctcgacaatctaatagataaggagcagatataatgtctgagaggctggttgcgttgaacatgacgtcccacgctttctccacatcaaagtctggcgttcttcgggctagctcattttggtcatttgaaggaagaacgaatgagaagatgaaagacgacaacaagacatgcaccaacattggacttacgagcattcaacatagagacaactttagacaacttggactttgtgcttttcttttcgacttcggccaaccaactaggccagggctcatccttcccaaacttgacagtacctgctcccagatctccatatactcctatcaatgctgactcaccctgagtatccttcacggcgtcgtccaactcacaacagagcatgtaggttaacatggagcttgttgcgacaggctctgatttacaagcgctaaggatcgctgcttcatctggaaacatatctgagtaatgatggtcgatgatcagacattttgttgtcggaccgggaaggagcggagggccagcacgagacccttgatcaagcgcgatcactctggaataggactgagctagagaagggggtaagctgtgaacgttggctcctttaggaagaaaaaagatttcaggggtcggaaaagaggatgaggttgactccgagcgggaagccatcataagtagtgttctataaaggatcaaggtggatgataaaccgtccgcatctttgtccggaataaggacgactgtatgcatgtgtgtgtgcaataataaggatacttagtctaaatagatcgagagagtgcacttgaactggataatcctactcacctcgatgacttccttgtacgcaatccctaaggaaactcttggcccgttccatgctttccctcggagcgggccagtcagcataaggcgaaagtttgattgacttgtttggacttgccgagacggacacgctgttgaacgaaggggaggctgaacgttttgacatcatttgggccaaactcttgaacatgtgtcgtatgtatggtgtacga

SEQ ID NO: 3105 - DNA, 14584 bp, Xanthophyllomyces dendrorhous
gtcgtatgtatggtgtacgatgctgaagcaaggcgcaagtcagtacgttcgatcgagatcgtcgcactgtgggtgcgtcattgttttgtcgcttagtcatcagagtcatctgcggcgttgaccgaaacgcatcatcgaattgcatgaggcgagctgtggtgacttgtaagggtcaagacatgcgagaatcgtctgtgtatgctatgagctgtacatctgggtccagatacattgaagaagagtagatggcggtggtggcactggcgatgagatgtctgagagaggctaggtcaagaaagtagagtacggaagtgaacaagaaacaggaggagaaagcaaggggaagaggaatgaagcgttctaggccactaggccaacgagccggttcgatctcacccgcctcttctgtttcctttgatgggttacatcatataaagaccctttcgagatggaaatgttcttcttcttccttctttcgccaccgttgaagtctatccttccttcattcaagactttctcacccaaaagatttatagccccaacacatgtccgctagtacaatcaagaccctggtgtgtacatgttcttcggtctacaatcgggatcagtgcaatacatgttattctgatgcttgctgtgctcttgaaaactgtctttcggtcacctggtcacccatgttctctagaacgtggtctctcttattccgttcgccatcgcccatctttactttggagtaagtcggccggtgacacggaattttcttgccacagatcaattgcttatcttactttgtctcattcatctcttcagtacaaagcatctatcgggtttgatcactatgtacacccttctccgattctgtccatcggcaaatgggcttggctcggtttccaaggacaagctctacttgtcattctattccagatttaccagttctgtcagttgatgcatctctgatccctgtattggttacctacaaatcaactgaccttgtacaatatgttctacagttgactctgcgctgcctgtagtggcaggtgtgatcggctcccgatacgctgtcgcttctcttgttcaaatcctcgccattctcgtctgggtggtaagccatgcacttttgccgtttgtctcttatcatcttctgtatagcttctgactgcgtttcaaacaatattcttgtacaccttacagcgaacggccaactacctcgccgccttcatcctcagcgcccttctctggcttctcgtgctttcgatctaccttgatgtccagcgaaagcacgtctcccggtcgttcttcgatcttttcgctgttcaaggtctcttttcattctggctcgtttgggtaagctgcagggttcctctaatacgtcattcttgagtacatgctaaggtttgccataaaactttttagtccacctaccttacgattttcatcggttctcaagccttcaacctagtccatggaaacatccacagaagcaccgtctggacctcgatcttcatcctgtgagtcggcttagcagattatatttgacatgaattcatcagctgataaacgttgttgtttctagtgcgctctttgccgccatctccatcggctcagccatcaccagtgatagccgaccagccggtgacttcaatcactctttcggaactttctgggttactcttggagttttcactgctgtccgacatcagcacaagctccgatcgctcgcttgggtgtctggcctcctcgccgttctcaccggtcttgtcttcgtctactcttcgtacactgctgtgagtttccaacatacatctcccttgtcttttttatgcatcacatagactaaacctactttacattcctgcaaaatctactttcactcagtaccaagcctaccaggctcgaatcttcttggtcgaagacgatgaagctgctgacgaacgacgagctctcctctcctccaatgcctaaatacatcacatgtccattcggatcatcctcttgcttaatttctgtattttgttgaaacctctttatcttctatatgaactgctttgttttgatttatcttttgcttgaatccattgttattactgctgttatcgattctattgatgctcagtaatccgctgtgattacccaagtttcatgatcatcggagagagaaaacgcgcgcgtcatgaaagtatcgatcggctacgcccgaccatagacttccatctctatcgttctacatcaaccttccagaccgtcaatgtagaggtatatacacatgccatcaactcgaaaagttccccgatccgataaaccgttcgaggcaccaacattatactcgtgctaccttcttcgacctgtctatgccaggtctagacggacttatgtcagttgtcttcctagcacatcgctattcttcttacctgtctctgctccatggtcttgattacttggcggctcaaatctcaagtgacgggaaccagcctggaagcaagcggcatgaaagccgatcgtttgtataacataaatttagtttactgatcatccgatttaaaaattgacatcacaggttggttcaacgcctcatccgatgcggaggctcagacaacataaccgagaagctttaggaggtgctgtaagatgtttctatgcaccctcttgaatggccctattgttcttgtccctcggccagaactatcactgaacataaactccttttgaaaaacatttacttattggtcggcgtgatttcaggcatatacaagaaaatggggaccatggaatatggaaatgctcgtgtatggatttcccagtaaacattctgctcttcaggtgggtgcatttgtctcgattgagtcaagatctctcctctctgctcatgtcgtgaaggatttactgatgagttcattgtggcgatcggtcgacggaaatagtttgagtgggcttggcaacatccagagtgagtccttgtttggtacactcataggttgctgtcatactgagttacactacatctctgcctcaagacgctcccgattcctccgtccacctcccgttgctctttctccaaaatatacctccaccggcaaactcaagatttccaaaccttctcttcaagcaccttacttccctcaggacccgacctctaatgaaccgctgacgaaagtaagggtggtgaagaagatgttgagccttcccccttggaacaggcttccacttcacgtccggttattctctagcgaagctgtgagactttggttagacaaagagcctggaaataaatctctcaaatcaaaatggatgaagtttagtcaggtcgaaataaagaggaaagggttcgaagtcgtttcggacttggcgggtgttcatggagatagaggtctcaggcaactgggaacaaagggacttgatgatggaacaggattaatcgatgttgatgattgtgtgtataagctttttctcggctctactttcaaactgcatctgatccagctcgggcctgacgcttttcgttctgcattatcactgaaagataaatttggtgtagcgcattgggaaaaatataaactcttatcagatgaagcctcgatatcccgtcaatcagcttgcacactctgccctcttccgatattcctctcccagcctcttacatacgcactctgcgtctcttccggtcttcctacttgtctatctacagcgcatctcacgtgcctctcctcccacttcttgacttcgcccgagtctacttcttccgctcatcctgttcatccggtcgaagggaaaatattaattcctcaatggggaacatgccctgggggatgcggatgggaaggagaatggggagatgtcgtgagaggctgttggacaaggaaaagaggggctgaaggtacatttgatgagagggaaaagaagaacagggagaataaagcgccagccagcgaggaagatgaagaaagtgatgaagatagggaggagaatagcgaagatggactcgatgatatggctgacgaggccgaagattaagtcctcataagtcatcgccggaataacgtatgtgcttcttatattcatattaattctttatgccgtaactcatacatgcgtctcgatctgatcgatcatatgaaccgaacagtgaatttccggttttgatccaatccatccatacacacgtacttttcaagtatcatacgcttcctcaatataaaaatgtcagagcttggcggctcaaattgaagcgagctctaactcatggaagacaaccaagtcttcattatcaacatgaccgtcgtcaaggaaggaggtggctgaaggcacagatttggatgatattctgaccatcttttatcatataactcataaacttcagtcagacagctcatcttgatccatcataaacttcttcgactgatggcatacagaatagaactgtttctttagaatgaaataaattgaagaatcaaaagaaaagagaccgaggtaatattatttcaagtaatccgccgaagtcgtcctacaagtcaagtcgagatagttgtgaaggcttagtctgaatggattgggacatagatatacccgaaaagagaagagacttggcttaccccaccgcgtagatttcgccaaatcgttttagcgcaaggatgacaactaccaagaaggaaccgggttgttctcaattaattcttcatctcttgaatatatcaaagcaaaaattactgacgttcaacatcaatagtgatttgcaaagcctctgatgacaccagcaaaacaaacagttaaacgtcagcatggtacaatctaacaagcgagatatgataaattcgactaaaactgaccttcctcgtttccttctgagcgctgacgtttgacttcgttcagcaatacgtgcgccacgattcgccaggagatctatattacgattgttttcattttcacagcattcatatgttgcaacgtcaacttctcttgtgcttgttcttgcataaggaaagacaagaagcgaacaaaggggacatgactgaccaccatgactaaactaagtctactgaaatccacatgcgcgaccatatgaaggatttttactactgaccgggcggacgaaacagcttgagcccatgcactgggttcgaaatccgatcgctcttggtagatcaaggcaaacgcgctatccagaaattttttacttcaattttcatgaacagaagatagaggaacagagatagaagaaacaaagacaagcgtgatcaaagtttgcatacgtatgaatcccggtatgtatcaggacagtttccgggtcaatcccccatgtctgaccggactgctcgcttgggttgtcagaggttgagcaaactggagagacctggttcaaaccccatgatggtagccctccaaggctgattcgtttcattcggcaaaaaaaagacattagtcgatgaccagtcgagaaccgtagtgatgtacgtagcgtcaggggaggatcgggcacacaacacgtacactatttgagcgggatttgattgatgagccggaagagacttgacaaatttaatgagcgcattctgaagccgtacaatctcagttggtacaggtttgggttcatcagcgtcaagatcatttcctggtacgtcatccgaaacgccggttgtcatgttgaaggaggcaactgagttggctgaaggtgtggccgagccaagagggtgcgacacgcaataagcgaggtaaccatctcggacagaaggctgaatgaattcatcttccagtcgggacgcctcattcaagaagaaagttgcaatatagaaacatgatgcgctcctgagtgtatcatatgctgtagaatcagttaaatgtaaaggtcctgaaagaattgaaacgtcaaaaaatggcacaaacaggtctccgacgagagtcgtctgagaatcatcgaacaagtcatacaacgccgtgttaggctgattgttgacaagattaatctggaaaacaaggagatataacggcaagttagagaacccaactcaacacaggtcacatcaatgcgaggaatgtttacatcagcatatctgtacaacggtaatgggaagggagtttcgatttccgtccagtgcatcgcctatgaatatacaacaatggaccaaagtaaataagacactgtgttccataccaataaggcgtcaatattgactaactgggggagatccattgcttgttgaccccactctatccatagtctggtcagtggtataaagaacaagaattcagagaaagacgccgtatgatctcattctgtgaggcggcgcacggaacgaagccttggcaaagaagataaaatagaagagaacatacccatgctatccagaacaactgaataaactctccgagttcaacaaaatccttgggagatcgaaagcgtctacttctgcctttgtatgattttctatcaaagcatcgagagctgggttttggatgttgatttgacatcgatgagaacggaaaggtaattctttgaagattgacgatagagcagaggcgcatcgcaagctgggtttgatgaagcacatgcgatgcatgttgatgaacgacgaagatgagcgaagacaacaatttgaaaaacaataagggaagcattcagaaaagagtaaaataacgaacccccccaaagacccaagctggtcgaaatcgcgctcgggaatctatcgtgtatcaattccggaatagtatggcattcagcatcgatgtgagcgggataatcagggagattttagaattcttggagatatgctgacatgatgaggaacttaacacgatcgcagtcctgatcaagtcaatcattcgatgatcgacactattcacggcattgtctaactttttctgtgcgatctcaaaaaatagatcgtccaatgctctgactgcctcatcagaggaaaacaaactagcgcaataatactattgccgcacaagagaaacacatcagcatcaacattcatgttgcgtcaaactctgacaaaactctatccaaagcctctatcgagagacaagaagtatatagggagaagcccagatcctgcaggaattacgaaccattgcaaagaggaatgcgggatgtggttgatccttgggatcactttcttgaagggaactaagtcacaacgatcgacagcgtccccgagccaatcataatgatatggagaattgaatcagaacccaatctaacagtcttcttgttttgttttgataaatgaactcgaggcggagagaggactatggatacagaccttctgaatctatcgatgttcatgtcgaattggaatactgccatcctagagaagaacaagtcaagaagtggggtttggatatgttcgggaagttcctcataaatcagcacatgtgctctcaaggccgttacgcgatcctctagaggtgctgaggatggcgaatgaagtaaggacccctgcatagaagaaagcgagggagtggataacggctgggaagaatcggcgctcaaacgatgatttgggttgatctgcatggaggcaaagagttcaggaactatcgagcgagattccgatggaaagattgattctgttgtagtgctttgtgctattggaatggtttcaaacgcccagggatcgagtgcaagatttgtattttctgtctcttcaatgagttggttgagcacatctacgggaaagtagtctgcctgaacgacagactcggtggctgtccattcagcggaaggagccttgcggtcgatgagatttgatgtatcaactccaaaagtagagctcgttccccacaactcttcgaaagcttgggagaaggcttcttgttcgtcgcgctttgcttgccgaccagggcgagatacctctgaaatgccatccgatttgacctggctggaggatgcataaggaaacgttgtttaagtccttcgactggggattggatttgctggtttatcttgattggtatggtcaggtgccagttgagcaagcatagattcaagttgaactggtgcagatgagcgagagacgacgatagtgtccacgatcagcgattcaagctctgctgttgtgaaattgacttggcagcgagaagaggcagaacactgaacctacgaattttgtcctctagctttttgacatgagttctcggtttttgaggaacgtcgtatacgcatttttgggagttctaaggaatcgcagaggtagttaaaccaagttagagaagctgagaaaggatagcttcatccatgcgtgagctatgaaacgcagaacatgaaaactgcgttctcttacctttaaacaaagagcacagtttggtctctcgcccgtactgatgaaggatcatagagatcagacaagatgcactcgattcgtgatgcaaaatgaagataacataccatttcttgagagtaataaagaagaaggaccatcggcctgattagcctcatcatcagaaacgaagagcacacacgtacatgcaggtttcgtctgatgaaacatagagatggacctacaagctttctcttcctgccatatatcaaatgaatcaccccagatcagttagatgagatacgccatgatgaattgtctgagagacaagcaacgggtggaaggactgacctgcaaatttgacatctaagggcaaaaagatggatcgttggggaacaggtcgagcgatgtgtcgatcgatgcaaaattcgtcagataagcgatttgttcgaatatcaggcagaattttgaaagaacgaaaaaataaaaagctctgaagaagcgatatgtgacatgaacgatcttacgctgcacctcgtttgagaacttttggagctgtgaccggctccgaggacatgatgatctggataaaagcgtcagaacctggaaggaaagtaagtatatggccagatgatagctcagatggtgttgcaggtcactcgaatgaatgataaccatcaacagactatcaatattttccccgtttggtgatcgagccaagcttactctggcctgactactgaagattgaatcattacttagattttggttcaaaagtaggacaacatgttcggcaatcacatcgcatccatccccaacagagttgctagcataccaatctcctctctcagatctctcgtaagaacccacccaacgtcttcggtcgataggatcttgccgttcatccggcccgcccgtctctttctccggacattcgccttcccccggcctggctctgggtagtcacccgggcttggaggctgccaagataaacaccggctccgtgggcttacttggaatgaacaaatcaaatattgtaagtacatcgaagcgccgttatctaagtatctgggacgcgccttgttttgctttctttatttccggttcctctttcttgatcatctctttcgtctctactacacaccttgtttcttgttgccagtaaaaacagttgagacagttcagttggcatccttggaggacacacatcttgcagtaatccaatcctgctatgtcaggcatcgacgagactccttcgaggtaagtatcatcggaagcgtcctattgtcgcctcgaaggcatttgtgctaaccgtactcaccaaatactttggtctccgttcctcaggccaagagtcgatcaatcatactctcatgaacttccttctctaccaaccatgcggcctgttgattctgacggcgaggaggaatacaccgatgaaatgagcgagtctgtgagtggatcctcagtaatccaccagatgtcctacatgattctcattaagcgcactctactctgttctatctatctattttatcgtggttctcaatcataggaccctaatttggatctgtcctactcatattccatcccaacgggcacaccttcgacacaatccggcataaactcgtcaagcaccgtcacaccgtccacatttcctacaccccatggctatgctcgctcctcccttgcctcttccggagctgctacgccgtcatccgtcgcgtctacccgagacactccactcgccagatatgctatgaagaatccgtatgctcaggaaacacctcgacaagccccgtcaacgcctctctccaatggcaatactcctttttcatccaccccggcctcttatcaatctgccagatctagaacgtcgattggctcagcaaacagaagtcttcgctcgagcttgaattcaacagcttctcccaggagtagattctctcgacccagtcccagaagacaagcttctccgctccgtgatcgaagtttggcatcaaagtatgacctctccggaatatctgcagctacaccttcgatggcctcggagagtatgtcttcgattcgacaagaggattcgttcatggacgagcagtctttgcctctgtcgtcgagggaagatcagctgaacgatcactcgcttttggaagatcaggctcagctgataggcatccaagaagagggcaattcttttgcaagtttcagccgaactgcggaagtgacggacggaagaacaaatcgaagctccaatgacgacacccggaaccaggaagtcgcagaaggagtggaagcaactgacgcgtcaattgacctcgaaaatcagacacacaatgacggcgaaggagagtcaaagtttgatgaagtgacggaaggagagcaacatggtaacgcgactgaggaggaagattctgctatcgaaggacaatcgagcaacacctcattcgatacttcgatggggctcaactccaaatgtagactaccctcagctgagctttctctcgttcttgaagctgaagaggaagaagaagaagaggaatcaaagcaggcaggctcaaccaagtcactggtggatgctcctacacctgatgtggttgtacgtgttcttagctattttcagttaactctttatattgctaacactgatcgatcggtgatttatcgtgatgcttaggcgcgaacctcatacgttcagttgggcctccggcgctcaaggtctgcggctcctcgaccagaactcttatcatcacccatgtcgtctgccacctcggccacctccgaatcacgagtgtcgactcccaatggcgcatctcaaaactctcaacaactcgatgtcaatctcatttcgattcctttccaatctgatggagacatttccgaagatagcctgacaggagagccgcgaagcatgctcagcgatgtctatcactccccgctcaaggacgccaccaacatcagcttctccactcgtgctgaaaccgactacagaacatctcctgagaccggtactccctatcgacgtcctttgattaaagaatttaccatcccaattgccgatttgactccagcagccacatctaaaatccctcgacctgccctcgatacacctagaatcatgatggctaccccactcccgtcgtcgaacgcagaccgaagaaccagcctcgtgctctccaccttgagctcctccatcacccgaccgaaagtccgaggaacgccccatactcgccggtcgtttgtaggatcgggctcgttaagaaattcgacgttggcgctgaacgcatcgcgtgcgatgtctgaaacgccgacttcgtctacccatatgctcagcttacctggaaacagcacaggtctcgaagaagattcttcgtttgtctcggtcgaatcggcagaagatctcacaaacctccatcgcgccaatacttctttgcccgtgtcggaaaacccgtccaggcaaattggcgtcaagcttcacaaacaccttcacgagctaaacactcaacagcatgttctcatcagcagtttacaggatgagaacgaggacttgagggatcagttagaggctgcacaagccatgcttgcttcagctcagatgaagaacaacttggaatccaacgatgagagcggtcgaagcgagacttcgatggccccggtttctttggaagaattggatgaactcaagcagctcttgtacgagaaagatgaagaaatcaaaagacttcaccagagaaaggaggaggcggatcaacgagacgccgaagtggatgaagaacttgctatccttcgacaacaaatcgagcttctttctcagcaagaactcagtcaggccgccgctgttgcccttcctccatcaataccatccagtccggaaccttctccttctattcggacacacgcctcgctcgaaaacctattgtctgctaaaaccgcggaagtagagtccatccgagtcgagctagccgaggtcaaggctacggctgagcgccatattcaagatttcggccgaaagacggagcaccttgagtcagaaatcatggacattcttgtggagaatgaggccgagctgaagcttgctcagtcggagaagaacgatctgaaagatgctttggtgaaagccaaagaagaaaaccaaaagacgatagaatttcttgaagaagaaatcaattcagtacgggccgagaaagatgtagaattgaaaaagttggtcgacatgcaggcccatctggattccacgctcgaaacggtcaccgaaaaagatcagatcatcgtttcactccgaacggctgcgttgaacaccagctctgacggacgggtcatgcagctcgaacttgagctttcagcagcccaggataaatgtatccagctcggagaggaggttcgacagctacaggctcaggtttcacaatcttccactcagctcaagtcatctgaagaatttttcgaatccatcactggcaaactgatggcagctgaatcaagactggctactgtgcaggaagacgcaactcgcatcgaagaagagctctctaccaacaaaaaacgtctccaggaagcggaggagaaaatcacgacccttgtagatcaattggctcagcaacagaggaatgctgccgaacgaggccaagaccatcagggagaacttctttcacttggtgacaagcttgctgcagccgttgctcttcaagaacaacagtcagccaaacaaacagaactggaatcgtcccattccgaagctttgagccagctcaaaactacatactctgaattaatcacctcgctcgaggacgcggtagccaaggccgatactcaggctgattcatatgtccaacaaatctcttctttgcaagcacaagtcagtgagctcgaagatcaaaccacgagccgagctcgtacgatcccattgccaccctcttcgcctggtccctctgccgatgattccaaaatctacgccagtggaatcgaaacatctttcatcaccggggatgaggtcgtcagtcagcttaaggctcaactatttgatgcgaataaggagcttagccgaatgaaggcagacatggcttcctcgccgtatcgtcgagcggcgttggatcacaagaacttacgtattcaagtcttggaatctctcaataccaacctggattctcatttgggcgctatgagaaaccagtatcgaaagctttccatcggttctttccgatcagccaactcgtcaatcgcgaataactcgattatgtcagttcaaacacctagaaacatcggatctcttcgaaaggtaagttcacacccatcaaagtctcgattcgagcttggtcctcagctatgtttctttccgtccgactcatttaatattgtccttgccatctatcagatgccttggctggacagtccctctcccgcctccaccttcaaggaagcctttgaaatcgagcgcctgcagtccgaattggatcatctgaatgagctcattgatctcaatgttgccaaactcaaggattccggaaagcaacagctctcgctgtcagatgaactgtcgagtaccaaggatcaactcacaaaagcacaatctgagtttgagagcgagaaaaagaaggctgaaggccttctttgggagaacgagcagcttcagcttcaaactcaaaacctgttgtccaaacaatcttctgattctgtgtaagtttgtctacttcttcttcttgaacatcgacatctgcacgccgctgactcttacgctttatacaaatgtagactttcaattcaaattacctccttgcaagctactgtgtctcggacaaaagaggaacttcttgccgttgaacagtcgcgtgatgcagaccggcagtctttcaagtcgaaacaccaggcattacaaaaaaacctgaacggtctcgaagctggattagaacgtaaagaacgagctctcaaagaagctatcaatgctcgaagattgctggaagaggtaggtcttctttgtcttctcttgaacaacagttatccacgaccgccttgttttagcgtttgttgacctattttcttttctttctcgtagaacttggccgaacagcaaattgggtctcagaagcttgagcaagatatcaaaaagatcaagaatcagagacgagaagagtctgaaagtctggcagcggcggaggccgctcgactgaagcttgagagcgaagtcaagcgacttgagcgagtaagtatgattttacttagttgaaattaaagattggagcagcgtgggaaaaacaaatattatctctgactgtatgtgtttcttgattaggatgtcaatgtggcccatagtgatctagaacacgccacccagcatgcagagc

SEQ ID NO: 3106 - DNA, 17225 bp, Xanthophyllomyces dendrorhous
cagcatgcagagcacctcactggaatcatcggtcggaaagatgcaagcccggttgatctgatcactgcagaaaaagagaaggcctcgctgagaaatgatatcagaaggcttaatcaagtaagttttcaccgattcggaagatcttaccacctagttggaaaaacactgacatgcatgagcgaaaacaggagctgtccaatgctcgactggatcttgaggattcccagcaagacgccaatttggtacgaaagaccctggagtcgaagcagtccatcatggctagtgaaattgaacgtcttgagaagacaagaatagaactggataccaaggttaggcactcgaccaaggtaagtgaattgtcgtcgtgtatatataacttttcacatttggtcctgtctaatcaacgatactcccgcctaaacattcgtcatccaaagcacgttgctgacgccgagcgcgagatcagcgacttgaagcaaacgttgaacagtatgttccaggatcatgatttgttctacatatatttcagctgttcatccgttcccttgactcccacatcattctctagatgcccgcgttgaagggactatctccgcccagcaggtcactcaagatcttcaaaatcttcgtcgacaaaagactctgcaagatgagaagcttcgagatgcagagatcgctttgagcgaagtcgagaacgttggttttttgtcaacattgtcctctgcccccttaatttgatcggaaattctaatcgtgcaaactcttctcttttagcaatgtatcgttcttaaggcgcaattgactgcatctaaagcaactacctcgaccctccaagaaacgctgacgcaacaacaatcggttcttgcttcgcaaacccaggatctcgcacagtaccggcttcaatcccaacaaattgaggcagaacgagagaccgtgaagcgcgagattgtcagcttagaaaaagagcttcaacgagcgaagcgagatacgcgctgcttgaaggatgagatctcgtctctccggagtgagcaaagcgcaagctcgagggcagagaaggacgtatctggcaagacaaatgaagagatggcggggaagctgaggttagcagagagcaagttgaaatcgctggaagctagtcagaagaacttggagcagagatacacatcagttgattcggagcttcgagtgactaaatctgagtaagttcaatcctgttgcctaaacgatcagtgtattggatgactcactgtatcatctgatctgcaatagtttaagcaatctgacagcctaccgacttcaagctgatgaagaggctcgacgtctcgattcagacttacgaaccgcattaaccgagtacgtatttgaagcttctatcctgtttcgatcctcacgttcaacatgggctgatcagttggacgtcctcataacggtttaccagtctgagcaatctcaaatatcgacattcgaaggaatctaagggattactagttgacattcgatacttgaagcagaagtttaccagggagaattctttccgagaagatttatcacttcagaaggagtatctcctcatcttgattggtcaactcagtcgacagtaagtgatagtttctctctttaaagtttgatgatcagctatggagcggttgccttaacttgcctatattttcgtggttgtcagacaatctcgagtgtacgctgcgatttctcagatgggttgtccagacgaaaaaccggtcattcgaaagcgacggacactcaagtcaacagttcatgctgtcatcttgatcatccgtactagaaactttgctactcaatggcgaaaggagagtgaggttaaggttgctttgatgcacgcctatgagcgcgtcgtgtcggaacgagctgctcggacagctatcggtactggtccttcaaaaccattgcgatgagtttgtgcaggctcgccggtatgtggcgtcctcatcaatacacttcttgctaggtcttcttcattcttacttggtttcctgagggaggctccatctgcattgtacattacttagttgctaacaacctgaacgtgagacaatggtcatttttctcaatataccctctcgacttccaaatcataactttctcaccactaatttctttcgataccgttcatagttctatatatgttctttctcaagtttaatttcattcgtttcactatcactgcgactaaaatcgcctgccgccgaacccaagacggtatccagcaaatgatccagcgcaccttcgaagcgcgatgtgaatacagattgtcagatgaattgcattgattatatattatattgaaacggatgatagagatatcttctcctgtaaaggacgagaaaccaagatctaagccttgttttctggttccttcacctccacttcgcccttatcgttcagactcattctgtaaagctcaacctcttcctcatcatcctcgccatctttgtcctctactcccaccggctgcttctcatcccgatcttccttgttcgcctcaggctccttgtcgtcgcctaacaacattctaccaaccaaccacacggctacctcgtttcgctccatcatctcggcctctccaacagccgtgtgacccgaggagttcttgatgtctattaatttgtctccaggagaagaagggtgaagaataagagcttttacgatgggaaggtgaccattgagagaggcccaatgaagggcggttgagccacttgagttttggagagagaattgagtgggaggaaggagaggtaaaaggtaattcaacaaatctgtgacgcaccggcccaatgatgtcgtaaaatttagcaaggacactttcaacttgtacacaacgcagaaatcgtcttgacagatcacaacaagaacgaaccgatatgaccgtttccagacaccatatgtaagcagccacaacccctatcgtctcgagcgtctgccagagcgttgatgccatactgagagacaaaagactggacctcttccagctctccgtatcggcacgagagcaagatatcctcgagctcctcctccgctggtttcgatggaatgttctgattctcggttgagcccattatgtctttgagtgaggacgaaagggtatatgctctgtgtgtatctgtgggatgatggtgaaactcgtaaaatcgagaaaattcaaaattatcagaaatctattgcttactgcgcatttcgatagtccgagcgtttcacctcgtcttcataaagatcaccatcaccatcacgacctattggaacctccgaaatggcaccacttttgactttggcaacgtatgtttaatatggtatctgcttaagatcccgtaggtacagatggcatgattgacgatttatctcggtggatttcttcccaattagatggtaagtgttcatcagactgttactaggcgggatccgaacagaattctgacagcctacattcggtaattgctagctcgctaaatcaatgggcgctcgactttgaggtagattcgtcttcattatgcatatcaatacatgcacatgctaacttttcttcaataacttactcatcgtcataagggaaacaaagctcgaatcctcgaatctatccgaattgccaaacagcgaggggcgaaacttcgagtcggaccagaattggaaatttcgttcgtaaagactttcatctgttcttgatcaatgatactagtgggttgtagctcataagctgctgtttgatggcttcacgcttcaaaaattagtggatatggttgtcttgatcactttctagagggtgagtcttttcgttcacgaacgaagttcgtatgatatgttgaatcagcctttggttctcaatatttgcacataaaacgttactccaacaggcgacactatgatgcactcctgggaggtcttagcagatatcattgactctgaagatgctcaagacatcgtctgcgacgtcggaatgttagtcaacttttatatcttccaaactcaagtctgagcttaatccgtcattgctgggttttcatttcttcaggcccatgactcacaagaacgtgatctacaatgtccgagtcatctttcacaaccgaaagattctccttataagacctaagatgtggatggccaataatggaaattacagagagctgagatatttcacgtcttggtcaaagcatcgggtaactgaggatcacgttcttccaactcaactaagaaagattacaggccaggttagtaattccctctcgaccgaacgatgtgacgtatgagaacttaggttaaacccctacactctctttttggcagactagcgttcagtttggagatgctgttgtagccaccttagatacttgcattggagtcgaactttgcgaagaactcttcacccctgcctcgtatgtatacaatcagccttttacacgcctcccctaatactcacatacatatgttgtccttgtgtcttgaatagtcctcacatcttgatgggtctagatggcgttgaaattttcactaactcaagtggcagtcatcatgagcttcggaagctcaacacacgtgtggagctaatcaaggaggcgacctataaagtgagccctatcgtcgatgtcgatatgtccgttcgatccttccttgaactgatcttactttctatgttctattcgagctctaggttggcggaatatatctctatgctaaccagcaagggtgcgacggtgatcggctctactatgacggatctgcaatgatcgttctcaatggagtcgttcttgcgcagggaacccaattctctcttaacgatgtcgaagttgtcaccgccacggttgatcttgatgccgtccgagcccatcgggcggtgagtagtcgaagtcaccaagctgctcaggcagagagatatcaaagaatcaatgttgactgggaactgggccaaggagtattgtctgctcatgagactgaggagatcgaggttagatatcacttgcccgaagaagaaatcgcgtatgtcacatcatttctccagattaattatggtcaaacttttcctatataaaaaactaactaatacgctacgtgtacgcaattatgtgtataagattgggcccagcctgctggttgtgggactatttacgccgatcaagggttcaaggatatttccttccgttaagtggtggaattgacagttgtgcgacggcaattatcgtccattctatgtgccgtctagtcgtcgaagcctgtgatagaggaggtgattttcttccccctttctctcaacgctttgtatgtcactgattttgagtctcttcattgttcattgcagaccaacaggttatttctgatgctcgtcgaatcgctggagaacccgaagattcaacttacatcccttcggatcataaagaatttgccggtcgcatcttccatacgtgttttatgggcacagagaattcaagcaaagatacaaggcagcgtgcgaaggagcttgcgagcgacattggaaggtctgtatcactcttgtttctttcttctttcccgagttaatttgatgattagacgatgccatcaaactaaccagacttaccattctatggtattttgcataaatagttaccacgtcgatctcaatatggacacggttgtaagcgctgtgacgagtttgttcggactcgtcaccggggtgaagcctaaattcaaagtctacggaggaagtaatgctgaaaacttggctcttcagaacattcaagttcgtgctgactttcttttacttctgagagaaggatttgttgctgattccacatacgaacacatctgaaatcatgtttgataggctcggctgcgaatggtactagcatatatgtttgctcaactcttgccatttgtgagaggtcgacagggtggactgcttgttttgggtagtgcaaatgtagatgagaggtccgttcactatcatccagatgctgccgttgtacattacttatctttgtccttcggatcgcactttgtcggtcgctgaaaccctagtcttcgaggttatttgactaaatatgagtgagaccttcgaccatatgactcttctgctttaattggaatactgacgaaatgtatcgtttattcagttgctcgagtgcagacgtgaaccccattggaggaatttcaaagacggatctaaagcgatttatcgaatggggatccgagaaattcgatctaccgattctagacaggttcgctcgcatcagttcatgactcttttatctttacggcaaaccctgacgcgttgagatatcctgcccaatgctagttttttgacggctacaccaaccgcagagttggagcctataactgaaaattatgttcaagcggatgaggtgagtgtctccacctttcgtcttagagctgtgaatacacaccgacaccttgcggagttttgttcatacaggccgatatgggaatgacatataatgaactctccatctacggacgactacgaaaaattcaaaaatgtggaccgtacagtatgtttgtcaagttggtccaggagtggggaggtaagctttctccgactgaggtgagtcttttcattcatatagaagaccgggtttaaaaccctgtgctcctgtgttgacctcccttttctgtgctttaaatgattcaagatcgcggacaaggtcaagctattctactttgagtatgctcggaacaggcacaagatgacgactctcacgccttcgtaccatgctgtacgtttgatctttccgcatttttttttcattattgcaagcgctgttcaaaacttaggagtatatcatgtgttttctgctacaaactgtaggaatcttattcgccagatgacaaccgtgagtcaattctttttctctctcctttctgttactttcacaatcaattgagccccatatattccttcattctctacttggtttccaacttcaggtttcgatctgcggccgtttttgtactcatccagattcccctggcagttcaaaaagattgatgccttagcagcgtcgctcccaaaccgagctggattgtccacagaagggggcaaagtcaagaaggactgatttgcgtggttgtcgatctacttgattatgtttccttctcttgatagaatgtttatgggattatgtgacgttgcacgatctgttcccggatatatgagagaagcgtacttggcgtgctgactaagcgaaagaatcactatccgctaaacgtatctgaaccatccgtacatcaacccccacccatttagccacatccatcatcctcatctagtatcgatatcaccatgtcttctcctccaggcgtccttcgatcagtactatcttctcctacgactacgccttcatccatctcattttctgatcaggctcctccctctcagttaaacaacccctcgggagtcgggacatcggcatcaacggtagcaagtgggggtacacgaggaggcacgtctttctcagatgatagatccaaccgacctttcaagtcgtcaagtaggcgaagcttaagtttccagcgatcaaggaccgtcagctctggggaaggagggaatgaaaagtcgtaccgtaacagaggtcagtcttgatgggctcttcttcttgtgtcattattcgtgcctcatatctttagtccaagtcgggatatcgcttgcatcgaatgatgcattcaaagagagccactatgtacacgcgccgcgctatctgatgacggccaagattcacgtctattgatgctctgtgttcactcatactcatcgccatcttacatctggatgcccacatgtcttccatcttctagtcggattcgatacctttgacgactgccacgatgatggtctgttttcattcactctacaaagtcagtataagcgttgtccattcaaatgacaacaaccagtttgcctaatcaacaaatcaaatccgtgattttttgcccatctccctgtttctcatttcgttgtacagcacaatctgaaggttatcatcgatcacgagagtctcggacatttctcgtagcggtctcgcgagatgaatctggatcggaggctttggactggctcatggaaaatttgttagaaggtaagttgatgcgtctttacttgatccttgtcttttacatcggaaaccatcgtctcaaccagtgtattttgggtgtgaggaacagacggggatgagatggtagcactacgagtcatcgaatgggacgagacggagcgagcttcctcggagaaaaaagaagatctccgagaggaagcccgagagcttcagcgactgattttagagaagaacgacgatggagacgagcgcaagatatcaattatcgttgaattcgtcgccgggagaaaaaccgaatcgattatgcgtttagtcgcactctatcgaccggactcgctcatcgttggtaccaggggctcgcgagggaagctggctgagtggggagctgctcttggagcgccaggcatgggctctgtctcccgatattgcatctcccattctgctgttcccgtcattgtggtccgaccggaggcaaaggtgaagaagagtatggctaagagggagaaagatccgaagcgtaagagctatctcgctttgctcggaacatcgggcactgctggtaccaatctcagccggtctcgctcggctggaggactcgcgtagatctttgctctgttcttcgatatcacctgacagatattgaattttcatctatacatctatcggattcgtgttggtcaaaatgctttcgcagctacacgttgaaggcagttcatctatactgtcacatccgctcgttcaaaataccttcgtaatgtttcttgttttctcaatagtgcaatttgtttccatagaacggtgccgatcatcacttctgcgttttgtatatcccattatttgtgtttgttcagtcacttcatggtccagactcaccacgccaacgctcagtctgctttcaagatatacaaatttatactattgatctgttatgttaatcggatatatctagagaaagcaagaattgttggagacatttgtacgcgtgcaagattaaaaggcaccaaaaaattcacgcgtatcttcgttgacgactttgctcggctgttcttcttctatctttgaccttttttcaacccatcttttcagctgaactcatcatgtcttccgatagcgagcaagatggactcgacctcgatggaatattcgttgtaagattttcggttctcgtgctgtcgcgtgatctttgtctgaatatgttcgctcttcaggggctggatgtcgatatacctaaccaacctcgtacatctgatttgtatttgacccccctacacattgacttcaatcttcctgttggttgatggtcacaggagcctcctcgaccggcctctcctccaccgactttctcgacgtactcaccgcccgaacctctccaaacgggcccatcatcgatatcaatccgcttagttggctcacatccgctctggggtatgtctcgtttcgttcttctcctcaccctatctttcgcttttttctccttttgtcaacatatgtgaaactcgagacacagaaggaattgatgtcagtcctgatctatactttattaaaaaaataaaaaaggtcagcacctttggaattcagctcgggtcttcactagtttcgtggtcgagaatgcggaggagtttattcagggaaggaacgttctcgagcttggagcggccggaggtatgttccttctatcgtcattctccttccaataacgctcagagtttggaggaagaagagttcaagctaacaattatatatttttgtttggccacttcgttctggttagctttgcccggagtcgtcgccgccctttcaggagccaagaaggtgaatttcaatcctcttcatagcttctctgtctaatcaagtcaatcaatgatgctgacgaagatttgatactcatgaataaccgtgcatatttctttctccccctcagacggtcatcactgattatcctgataaagctttgatggacaacatctcatttaacgttgaggccaacgttcctttgccttttagagagaacgttcacgttctcgttcgtcgcctcctctctcataacataagttccatgaaattgacaattactgatcaacctaactctgcgctcataccatagggccatacctggggaacagaagtggactctcttctggcttgcttgcctgaaggtgaaaagtttgatacgctcatactttccgatctggtacgttattggctattctttagtccctttacatcaaatgcatcacccttcacaccctgacctttttgtctctgtattaatgggaatttaaaaataaaaaaggtgttcaatcatactcaacataaagcgcttctcaaatcatgcgctcaaacctccagtcttacgtctcgcttactcgtgttctacactcatcaccgacctcatttcgccgatcgagacctagtcttctttgatctcgccagagaggatggttgggaatgcgaagagattgttacagaatggactggaccgatgttcgagaccgatccgggagatgaaaaagtggtcagtatgattttggctactgtattcaagctcaagtcctgatgccttcttctctgtcatgtacatttttcgactggaatgcatcacaacatagcggggaaccgtacacggatgggtttgcaaacgaagcagtcaagattcatagaacagacccaaaagaaaatacaaagaaatgatcttgaaaacacacataggtgtacagggtacaaatgagattttcatacagaaagtgaagaaaacgcaggattaaccggattggtcattcaagaacagtgatcactccggatgatccaactctctttttcctcagatggaagagaggcagtataagtcgaaagtttatcgagcaattctgagggtgaccagatatcaagatcgccttctactcgggaggatcgatggcagaccttcgcatgacgcctattaagtaacgaaatcgaaatgatagcaaatggcgacagaatcagctttttgttgggtatgattctgatcgttttcttttttgtttagttaaacgtaccaccaaaagatctcgggaacttgaacagtcacatcctgttataccacaataaatatcagatgcttgaacagctacaacaaaaatggacagtgatctcaccttgacaccttctacgggtatccatcctttgcatttgtctaaaacgagttaaaggtttacagacataaattttacacaaaatatgctgatatcagcttcattttgttctgaaacacaatgttggcaaagaaaatagctgacggcatagcccttcggtgatattcgacttctcatcgggtcttttgagatgtcgttgagatgtccggaatctaagcagatacattcacagagcggcacacgaagtggaatattagcctgtttcagcgtgaaacaagaagacagaattgcccacgcacttgattggaggagagaacggaagtccggttaccggcgatattccgtgagcaaagaggagatgatagctttttgaagtaatggaataatttcacatcgtcagctgcaatgtggaaacagaacacaagattagcgcatgcttacttgtatgctgacacctgatggtatgcgaaacacaaaaggaggctgatgttcagggcaatttttgactcttatcaatcagcttcttttcaacctgaccttggttttgagagcgactagatcctctccatcctccacgcaaatcggacaaacaccgaatttcttgctggtttttgtggacaaaacatacagtcaaataagaatatgtttttccttcaaaattatacaaacgtaccttccaagaccctgaacccatcgaggtgtataaagatccaacatcccacgtggaaggaaattgaaggtagctgaccgagacataggcgcgctaggtgttgggacaggaagaccgagattcttacacgtttcagcgggaagagcggaaggaacagtgactgaggttacaaaagcagatgtagctcagctgttgttcttagccttcagatcgacgagcagcgggaagggagaaaggactcacattgtcgatacattgctttgaactcatccctgatttccaatccgggagggaatgttctgaaagttcttgatttagaggtacgttgaactgacaaagagtctaacgatggattatatggtgacgatggtggggatgatgtataggcctcgttttctggctcgggagaaggggacaaagatgaaagtctagaagatattggtgaagatgaagctcggagctcagttcttggagtcgaaactttagtgggagtagtgtctacgtcagacaactggcgggctgtatgtaaaaatcctgaggtttgattctcaggtgtagaatcggacggatctggccccaaacgggccgaagaactacggacatgcgaggtgagtctcattacagggacgtgtttttcggcagctcggcttcggagatgtggaagcctgtatggggaaaagcgagaggttcgaagtggccgatattcagaagaagaaaagacgtcgtcggcacgtctgataggtctcaacgatctccttgtaacgttcgatgtggacaagatccagtgtttctgtgcactgattcctggagatgaacatgggacgctggaagagaggggtggcagaaaattgctctcttgtggggatgacatggacgaaactgagtcacatggcgaagctaagtctgactctctgcttcggaggtttcgagttccagatggactgggctcggatcgctttctctttcccagacaatgtgtgctgacaggggtttgaggccgtttgagtgcgaataccggtaggtgttgctgttcactagagtcgttcgatgaaggctgcgacgtttgaggggaaggcaggtgcttttgtttgcaaggaggtgtttgagaagctctccatcggtctcccatagccaaaagagcatgtcgttttcctcgagtgatatctagattagatagggttctggtggcagcgcttaagacaacgtcaggatcttcatcaacttccaaaatcggcgcatgctcatggttactgtaacgtgaattaatgtgtcccaatggatactttcggatgatattaggtgtagtcgtttgaagttcagcctccttctttgggttggaaagctttagaatgattcgcttttgtctcggaggaggactatttattggagaagagggaccttgacgatacagagaagggcttgaaaggatgggatttgactgtctgcgagagattgatggcaaaggaatagtgaatgaatgtttggttttttccatggcaggtgattcatataattcgtgtggagaacgatttttttccaaggatgtgactttgtcctagatgacaggtgaaaatccaaagtttcttcttttaggccatccaggcacagggatctatgcgcggtaataccatgagaattcaaacgtacttgaaaagatacagggaagaccatgtttgttgcgacgcactcggtcgtatcccaatccagatgctgcttccaatggccctcaccttgagaaaacccaacatcagcccaagcagatcctggttcagaattctgctcccgactcgacgggctgagtggcgctattcttccgcctgtgtctcgtccattgcctcgagttcgatcgaaaccggacacgccgactcgctcacttcgaggggatgagccctgtggaaatggggagagattgaggtatcgaaacgggtctgaaggatatcgcgttataggggctggagaatgcaaaacttcgccgggagaactaggatttggagtttgataaggagctgatgtgtcaaacagatacatcttgggtagaggaaaaagaggacggtttagatcaaacagatcacttttcaaaagagaaggaatgaggaaagaatgggtgcacaagataaaaggctcagatagaaaagtagatggcgaccaagagacgaaaagagaccagatgaagaaacgaaagaagaaagggaagaagagacaacgaagagacaatggagagatggctctttttcctgtcagtcagtcaatcaatcaggcacacggtcgaccgtcactcaggaacgagagatgctctgtcagcccctgaattgacctttgatcagccgaagcagccttgttcacttgaccgttcatcaagtggggtcaacttttgtcttcgagcatctcaagactaagatatcgaaacggattgacaagtcacacaatctgaaagaaggttcatagggttgataaatggaacgctcgtgaagatgaaaggatgatagttcgtggtcagttggcggtaatgaatatgaaaaaattaaggaaatcatcaaaatattcaatgcgctcatcaatctccaagcgtcccttccttatttctttctgacaacaaagattctctcatcatcaccatctttattcttgagtatgcagtcttcagattcgattcccggaccttccaaaccagaggctaagtcggtcatctactgtcaaggtatgctctttcattctcttttcttgtgatgtaacatactgatgtaaatttccgtaaaagtttgcacttggcctatcgagtactgcgaattttcgcctagttcctccaagtgtaagacctggcttcaagacaaccattctgatttgttcgaaagatactactctgctggtacgtttaatttctcacttccagatcccctgagctacaaatccaagtttgatctcatgtgatttgggcttattgaaacacttctcaaaaaaacttcagatgcattgcagaagaaaatgggtacactttcggtagagggtgaaaagaagttggaacaggacgtggagaagcaagagaagaaggcgagaaaaaaggccgagaaagaagaagagaataagaaggtccgtccgcgctcttcagtccaagttctctgtatagcatgctgaatacgcaacccttacatctggtaaatgatcaaacaggctcttaaggtgggttcttatacaactagttataatgttgcctctctttgttggctatctcacccaaacctcttactttctccatctttgtcttgatcatttctccaggtcactatcaagcgaattgaaagaaataagcggaagtacgtgaccaccgtccagggtcttgagttctttggtaagtagagtacttctcgtagttctgttcttcactcttccttctttctcacaccacctcattgggtcacaggcattgacctcaagaaggccgccaagctgtttgcacaaaagtttgctactggatcaagtgtgaccaagaacccgcagggacaggatgacattactgttcagggtgacgtgacggaagagattgtcagttctttttatttatatgtcttgatggtctttgtcataccattttactaaaacacctgtttctctccttctctttcgattaccaacctttctcgcatacaacacacagtctgatattttgacatctccctctggcaaagaggccgcgatctttggaaaagatggtcttcctgaaaagtcgatttcaaaagtcgaagagaagccaaagaaaaaggctgaagtggttatttaaaagcttccatgacggtcatggcttcaaaactgtcaatcttcatggcagagttgagaatgcgtagataaaaatgatgtggatgactcgctcgatgacaaaacttcaaagaattcgagttcataagttattacagacacgtggctggcccacaaggcggagtgtattgccttcccccagagaatgctgcatacgttcagtctctgggcttaccgaagcagctagagatctgtcttttgctgaggcaagatctctccttgtttgagctgttcaagctcaataccgagatgaaagagaacggcccaatggttggtgatatagacttcccaacaacagggataatgaccttcgctacaagaaattcaggcgcattgaagacctctagtacgtgatactcatatttgagcatcacatgatatcttaccaatcctctctcctttattgttatttcatagtgaacaactaggagaattgggatacttcttgaagcggctgactaagcaataagccgagccgcatgccgaggcatggccgaatccacagaagatgaccgattgggggaacctagcctcaaatatataaagctactcaatctgaggatcaaacttcttgccttctcatcccttcgaatctacttcgcgccatagcaagtgaactaaatctaacacaaatatcaatatgtctttcagcgtgcttcagatcgttatcgatcatcccggacggtcggctggactcgctttgggtctcatcggcttggccgtgttcgtcgactggttccatctggctcctcgaagatcgcctctgtacaacttaccaggttcgacctgtcgtctgtggccgagatagcgctgactgtgaccgctcgagactgactgcctgcctgccttgtctcttgtcggatgctctccgacttgtcgtcttgtcatgagcaaacaggtccgaggctagagagctatctctatgggaacgcgaaggacatcatcaagtgagcttggcgatcagccaatcacttgctgcccataccatatggcctgataccgggcggcgatagctattgatgtgtgctgacgtgttgtgctgacgtgttgtggtgtctgttgtgatgtctgttgtggtgaacaggctagaagtaggcgtcgcacatagccatctggaggcggtctatggaccgacgtttgtgtacaggggtatgctcggccagcctaggctgtactctgctgatccgaaggtgttcaaccagtgcgctctctctgtgactgctgaggcggtggtccgactgctagtggctggttgctgactgtcgacttctggttgctgactgctgtccactgtttactgtccactgcctgctgtccactgtctgacgacggacgatggctggatgtggtgaacggaatagtctgatgagccaggcgtacgactatccgaagccttggcacatccgaaaggtcttgggctccatcgtcggtgatggactgctgagctctgagggtcagtccgtgctctcttgtgagactggcagcgctctcggctctgcctggtcgagcgctcggtggggaggagagaagctgatgctatccgct

SEQ ID NO: 3107 - DNA, 1738 bp, Xanthophyllomyces dendrorhous
cggcagcgccggatcatccttcctgcgttctctgcccaggcgatccgggagctctttccgatctttcttgacaaggcgatggagctgacggagaagatgacggaggaggcggcgaagaaggacgggccgacggacggatccgaggcggaaggagaaaaggctgggccgtcgaggctggtatctgaaggggtggatgtgatgttctggatcgtacgtatcgatctttgtctgatgttgcttctctgtctcgactgatgaactgatgaacggactgatgaacggatgggcctgtctgtagggccgcgcgatgctggatgtcatcggtctggccggtgagtgcacgcttgatgttccgctccatatgttctgccgctagagacgacgccggacaggacactgaccccgacgatggctgtctcacgatgtgctgccgatcccatgatgcaccgtctgtctagggttcgactacgactttgactcgatcgagaaagagtcgaacgagctttctatcgcttacaagacgatgtttgacggcctgtctggacagtcgacactaggcgtccttcaggatctgtttcctgtgctaaactacatcgtacgttttgtcccatctcagaggcatctctgccgggctctgtctgactgtgtttagctgagtctggctgagtctggctgagtctggctgagtctggctgagtctggctgagtctggctgagtctggctgagtctggctgagccaagctctcccggggctggatctgtcgtgatgggtgtccgtccactgtatgtgcacgatgctgaccggtgttccatgtgactggctttgatgtagagaaccgagcgtcaggccatccgagaacgagcgatgatgactgtgaaccgttatggaagggtctgtctctttgctgtctctgtctgagtcttggtgtgttctatcgatctcatgtgtgctgtttatgtgtgctgttcatacacacatgtctatctctggacgtctgtctgacggtcgacacaggacatcctcgctcggaagaagaaagccgttctcgatctctcggttggtgtcgatggcgggaagggccttgggaaagcagacgtccaggggaaggacatcttgagctctctaggtctgtccgcatggggtgtttgtgtgatgttcgtgaggtgttatgtgcctccttccgagcgagctgacctcttctctgtctcttctctgtgtcttccttgtgtcttccttgtgtcttccttgtgtcttctttctgctcggctttcctttctgtcgctggcacctgtagtacgggcgaacatggctaccgatctggctgagcagaaccgactgggtgatgaggaagtgctcgcgcagatctctacgctcctcctagctgggtttgagtacgtcctatgctggtgtcttgtgatatctcgttctcatggtcaagtacatacgctcacacctacacgcccataccggtacactcgctggtggatctctttacttctcttgcatcttaggacatcttcgactgctctgacctggatgctccactcgttgtcgactcggccagagatacaaaacaagctgagggatgaactgctcaaggtggagacgagcgagcctagtctgtatggtctctgtgtctatctgatcgtgatgtgaggacgtagcgggatgctggtcggagctagccgtcggtctggaccgactgatcaagacgctcactcacccacccactccct

SEQ ID NO: 3108 - DNA, 334 bp, Xanthophyllomyces dendrorhous
ggatgaactgctcaaggtggagacgagcgagcctagtctgtatggtctctgtgtctatctgatcgtgatgtgaggacgtagcgggatgctggtcggagctagccgtcggtctggaccgactgatcaagacgctcactcacccacccactcccttccttagtcgtctactacctcagtcattcactaactcactcgtttactaccttactcctatgctcgctcatccgcccggccgatggtctttctcgtgtgcagagacgagctgaacgctctgccatacctggatgcggtaagtgatctaccgagtgcgcctggtggcatgtgtgacgagctg

SEQ ID NO: 3109 - DNA, 21278 bp, Xanthophyllomyces dendrorhous
  misc_feature (638)..(647): n is a, c, g, or t
gtggcatgtgtgacgagctgagctcatctgtctgtgttcttctgcgctcatcgtcgttcgtcttcgtcgttcggtctgtctagtttgtgaaagagagtcttcgtttcaccccgcccgctccgggcacgatgcgagtggccgccaaagacgatgtacgtgtgtctgctgtgtctgctgtgtctgctgtgtctgctgtgtccccggtttctctgacagactgacgaatgcaactgatcggttcggtctttccacggtctgtgctcacttggcctagatcatctctctgagcgagcccatcaagggccgggatggcaagctgatgacagagatatatgtgccaaaggggacgacgatgtttgtccgtgagtagagcagccgtccgctggatgtacacgctgtccgtctggctgatgagatatgtgtggatttgtcgtgcgtcggacacagcgatcatgcgtatcaaccgtgccgctcatatgtacggcaaggatgatgctgacatcttcaggtcagtcggggctttctctgttgcgactcagcctggtctggtctggtctggtctggtctggtctggtctggtctggtctggtctggtctggtctggtctggtctggtctggtctggtctggtctggtctnnnnnnnnnnttcctagcctggcttggatcgccgtgtctcagtgtcgaggcgttgacctgttgctaatctcttggctcgtcgtgggaaacgctctagaccggaacgatggctagagccgatgccacgatcggtgatggaccttgatgtgccctatggtcaccaagcgacgtgtgagtacagagcctgctctgtctgtcgtggcgtcttttgactgtcgctgatgagcgctgacatcgctgccggtcgaccgggtcctactagtcctgggaggtcctcggggatgcatgtgagtccagtcggtcagatgaggtgggctacatgggccgtaggccgtatgggctgtacgagctgacgcgcgctctgtttcttctgtcctcgaagcggctaccggtttgctcttgctgagatcaaggcgtttctgtttgtcatcctccgccagttgacgttcgagagcgtcgtcccggcgatcgactatgagcatcgggcaaacatggtacaaagaccgagggtgaagggcaagaaggaggaagggttccatatgaagctccaagtgcgatcggtcaaggactgaggaagcggactgtgttgcctgccgctatcttatgctatgttatcgagtcatcattgtctttgcgcttatatcactcgaaacccatgagcgtccctggctctgtgtgttagatttcattacttcatctcagcttgtcactttccgactggccgcccatgctttcgccctctccctcctcctcctcttagcttcttcttctgctgccgaatctttatcctcttctcctattcggaccttgtcctccttactgctctcatctaaggaccgaatttcgtcattttccctcatctttccaggtcccttcctctcagatcctgatgatgacgcgtcgctatcatcgtcttcatcacttccatacccacccaacaaccctagtcctcctttgctgacaccatcaacagacacaacaggaggagggggctttttggctgccgctttgaatgcctcccatcgtttacgccaacgtcctctgaagaaagcgaaacgaggatctgagccgtggttggtaagaatccgaagttcgagcacattaggattcggagatgcctgaagcgactttgatgtgtgttccatcaggattgctatcgattctggaggctttttgtatgatgaaggaggatggacagacatcgacaaagacgataggatgagggaccgaaggctcaaatgagagatagaggagcttcttacctcttcatcgctcagaccccaaacatcttctatttgaccctcaagaagtccatccttcttccgttcatcttccagagcagccaaccgaccacccctgagtgcgtcgagctttcgtctcttcttatcatgttcatagttttcaccttctgaaccagagaagaagaaagtatcttctgcatcggacggcaggtctgaccaaccggctgttgaagatgatgctgagggggaggagggtggtcgtggttgggaggatgaggagtgaaaggcgggaaggatatggagataagaaaacctataatggaagaagggttgtggatgacaaggatcgaatgaattggtcaagagcgagaaccaatgtcagtcaaaagtcgacatctgtgcaatgaggtagaagaaggagtacgtcaaagcccattcttttgactgaagacgggtgaaggtcagtagggttcttgtatcccttcatattagattgttgcacatcttcatttccagaaacaacccttctagtgatacaggaacgccatcatctatatcatcgagagagagaaataactgaaccaaaccgaagagcaagaagaaggcaagaccgtacctgtcagcccatattccctcgtccgaagcagccgcttcatctatgagaaccttcagaagcttgccagtagaccgaccctgtgggtcgaccacctggcgggcgtcgacatcacgcgctagagctggattgtttaatatctcggcctcatatccctgaatggatagctcgttcaactcatttgatctgtcgggggaggaaggaggagaagacgaccggtgtctatgggttgaagggttgtagactgggtattgaggatgagaagatgtagacggtgtgtgttcggtctgcgcctggtgaagtctatcctgaacttgacgcttcgtccgtttctttgaaatctttgctcgtgaaaccatccagccagagagtatgtgagtgtgcacgaccgtatgaacgtaagtgtcagtggatggcaaaggtgagtctatggggaaggttgaaggtgaaacgatgctaacaactttgctagggttaaatagcaagatccatgccgtcctgcttgtctaggatcagtagtcactctaacactaactgttctatcgtgttctgttctctactcaaacgacagggtgaagaggctgacgaacggagttcaactctaggcatgcttcaaacatgttgttttgtatgcttataactactcagctagctgtatatgctgttggcttgtagacttgagtagctaacgatctgacgtaatcgtgcagtctctttcagctttttggttcttttgtcttgttcaaacatagaacaaaaggaacatccgatcaaacatcttgcattcattagataactcagtgtttgtcggatgcctcttttgtgtctttgagtatgtgctctttgtggggaacaaaagaacgccgagaatggaatctctattcaggattcttgacttgatttcatcgacaacctaccaccatcatcaccatcactacttctctagttgaactctataacgtgcgccatgggatctgactgggatcccttaaagtctgggcccattccggagccttcctcaatatttctcacctcgctctggtccaagcatgatctggataccattcacgagaaacccaatggagagctattatcaccaccgttatcggccagacctagaatcagcccggacgccccgcctgcaatagaatggacatccccaaagccaggggtttctcttctgtacaagtattgttccagttgggactatctgctcctaattactccagccgtcattttatccgcagcctcgggtgttctcacgccgttcatgacagtcatcatcggttcttccttcaacgcctttgcttccttccctaccgaccatgctttttcgacaaaggccgagagagatcagctcaagagcgacatctccaaagcctcatttatactggtcgggatgggcgttggcttcatcctcttgaatgcgctgatggcagggttatggattatcataggagaacgaatggcccgtcgattaagaaatgaagttttcacaaagatcggctccagagacatgacctggtttgatcttggaatgggtgtccatgatggtggcgacgagaacgtcaagggaaaccaggaagccatcggcgctgctggtctcatggcgaagtttacgaggtgcactcgttttctttctttctcaggtatagaggcctccgcttatatcaactttgtgcgcttatcatcaaatcagagaaacagatgaggtccgaattgctacttctcaaaacgttggacttgttgtcggagacgttttcactatcatcacctctctcatccttgctctcatgaaatcttggaatctcaccctcgtcatcctgtctgccgtaccggtggtcattatttgtcaaggcgtcgttcaacacatctcctttcccttactctcaagtgagcgccgaatttttgctgccgcctcgacaagatcagaacgagcaacatcatctattgcgaccgtcaaggcattcaatgccgagaagaaagaagccgacgacttcttcagcgtcatcaacaatggcaaaaaggtcactgctcgaatcatcttcgtctgggggactaatcttggactctcggcctttgttctaaacaccatgtttgtcgccgggttctggtacggatcagaacttgttcgtcaaggaggaatccaatctggggacgttattaccgtcttttttgccacagtccttgcctcgagcagtcttcaaactatcatgcccaggttcgagtccatccaaaaaggtatgggcgccatggtttctctccaggtgcttataaatcctccaccaatacagtcaaaactcgtgaacggagacatcgttagcagtatatacagccaaggctcagcagatagatcttccatgatctcttcagccctcccttctgcttcgtactctatcatggctaacgctcgacctatccctggccggagaagacaccggagaactgccacgcttactcagatccgtccggcaaaatgtcacggagaattcattctgcgacacgtctcattcttctatccctctcgacctcaatcccttgccttgtcggacgtaacactctttctgccctcgggtgaattcacattcattgtgggtggctctggatctggaaaatccactatcgctcagcttcttcttcagttgtacaaaccgacaggggggtcaatccatatggacgatcaagataccaacgtactcgaccccggttggatgagagagaatattgcttcagtccaacagggctgcgtgttgtttgacctgactgtacacgagaacgtcgctatcggtctagcaggttcaaagtcgagacgaccagaagatgccactagagaggaggttatcgaggcctgtagaagagcgctcattcatgaatttataaccgatctcccagatggatatgatacaagactcgggacctcaggcgccagtttgagtggaggtcagaagcaacgtatagcgatcgctcgagccgtgttgagggatccccctgttttgatacttggcatgtctgttcatccattctgtttctttttgttctgtctgctgacaaaatatgctttggctcttgcgaacttctgctttccactgtcactcacctagacgaggccacttctgccctcgatcttactgccagagttctcgtgttcgaggcaatccgttcctggcgaaagaaccgaacaactattgtaattacacacgacctatctcagatcgaaccagataattttgtgtatgtcgtccagaatggttccgttgtcgaagaaggcttccgatcagatctcgaccggtcgaatcaagctttcagcaaaatgttacatgaacagcagaaagcgccattatggacggggccagacgagattgatgaatgggatgacccagagaatgtgatggatgtccttcaagccacaacaactgagcaagagactccgttcactggtttcaacataactggagccattcagccgatcccgggcaccatcaaacgtcagacttatcaacaaggcgcatatcttgacattattgccgattatacggataagcctcgattgacccggcagttctcttctttgatttccaacggcggtcccttgaattgtgaccaccgtcaatcaagcaataacctccctattgaaggtgttctcaatttcccagatggtctcaggaaagtttcaccgtctggtaactctttctccaatagagtcagagatactatctacgatacattcccggatgagttttccattccggctgttgaaccaaccgtgttttcaccttcgggttcatgcgatgagacaatttcgtgggctcatcaagaaacaccttatccgacgagagctatcaacaagtaccctcaacatccgtcccttaaccgaatgaatggtcggctcaattcatttaaccttctggcaggagaatcaaccacagatctcgaacgtcagggtgagatcgccactcgtggtcgggccggtttactctatcctggctctcggatcgaccgtcgacggaacaacctctattcttctggactccacgggccggacgacggcgctttgaagagcgaggtgataccggaaaagacccctgggatactcgccgtcatatggttatgtgtcaaatcttgccctctcaaaccccttcttgctctcggcttcgtcgcttctgtaggacaaggagcgatcacacctatctggtcgaactatctatccacattgatggcgctcgtcgctcaaggtggaggcaatcccagtaaactccaacgagactcgttggtcgttctaggtctttcggtggcaaacgggttgagcattggtttatccatgatcgcgctcgacattgtttccaatcagtgggcatgcgacatgagggacaaatgtttccgacagatcatggctcaacagaaatcatggtttgatcaaacggagaacagtccgtccgctctaagtcaaacgctcatcaaagacgcggatgacatgttggcgattgttagtgatattccaggaaagttcgtcacttctgttgtgatgataggcatgggtatcatttgggcggcgatcgtgggatggaagttaactttggtgggggtagccgtcattccagtgcttctggtatctgtgggtgtccaattcaagttattgaacaggattgaattgagaaataaacggacgagggaagaaatagcaaagatcttttatgaggtttgttctctcttacactcattcttcttcttacctcaattgagctgccaccttgctgacatcgctcggcatatgatttttctctcagacggtctccaacatccgtgctatcagagcaatgtcactcgagtctatcttcatcgaaaagttcaatatcgcactagagaatgcttacactaccggtcttaaaggggcttggatccaaggagttggaaacggattgatgaatggcttagtgtactttgtcgaaggtaaacgaaacttatcagttaagcctcacccattcatatctttcctgtttgcctgaccatgctatactttacaacattgtagccttactgttttacgtcatcgccgtcttcatgtgcgacggaagctacacctacgctactgctctccgagtcttctctctcgtcgtattctctttgacgtttggagctcaaatgctgtcttttcgtgcgtttggttactatatctatatattcatcctatgtcttgagtcagttgatcttatcttctttctcttggtctatatagtccccaccgtggccaaagcaaagcaagctgcacttgacttccagggacttgtcgctcgatcttctgcggtgaccgaagagggcaaaggaagccttcgaccaaagatcactggccaaattactttttctgatgtcagattcgcttatccgactcgaccagaagccgatgttctctctggtatctctttcgatatcgatcccggggaatgcgtagctatcgttggcgcttctggctctgggaaatcaactatcgccgcgcttcttcaaaagctgtacgaacccggcagtgggtcgattcatctggacagacacgctctagcagaagcagaggcaagatggatcagagaacatatttctatcgtttctcaaattcctgctttgtttgatatgacggtcaccgagaacgtcgcatacggaactcatcagctaccattttccgaggtcgagcgcgcatgcaaggcggctcaagttcacgatttcatccttagtcttccccaaggttacgaaacaaacctgggtgaaaacgcatcattgatatctggtggtcaggctcaacgactccagatcgctcgagcactcgtgaaacgagcggatatattgatactggatgaatgtacgtccgccctagattcggaaaatcaggcggcagtcctagagacgatcatgagagtcagaatggatcgaacggttatcatgatcactcacaagctaccggcgatgatggcgtgttcgaggatcctggttgttagaggcggtagcattgcagaagacgggacgtttgatgagctagtccggaagcgtggggtatttgcagaactcgccagaggcggagagtgggagtaatttcatcatttcatcatcatcattaatttatatatatcttgttctgtccgttttcttcatgtgtactatgggtttgctaggtttcgttccttttctcatatgattgattgagcctttctgtcatctctctgtcgactctctttatacaatgtcgtctttctatagagatgcgctacaataggcgtatgaaatcccttaacatccgctgatgctcatgatttttcctctccggtcgagagaaagaaagcatgtagaaaacagggatggtatatacgggacccagatgggaacataaacgaaacatgacaagagtgaaatatgtgaatgtgtcccgcgatgattgaccagaagtaggaggaaagggcaaggatgaagtgaatatagaggatgatacgggatgtagatgaacagtcaggaacaagaggtagatgggtagacaaggaataagaaaagagacaagaacaatgaccaaagcgacgaggccaccacgtctacttgccctttccagcgccagccggtcccttctttccttcgaacccacctctcgacttgtgtccaccgccgctcggcttgcttccacccttcttgtaatccttcttgtctcctttcggtttgattcccttcttggcattctttcgggcttccaggcgggacgagatgttttctgatcgtttcttttgtttgatagcttgagttgtcttgagtttttcttttcggtcggacctgtttcgtatcaaagaaagaacgcgcaacaagacagacagaaagttgtatggaattgatttcatatcaatttcaatgaacaacgagagaatgagataaaaaatccaaaactcaccactcgccagcacttttgctcttctccttctccttgcgcttaacggccttcttgagtctactctcatcgtccctgactttaccgccctcagctctctccaccgcgacatcccatctggcggactcttccttttgtgctctgacgtctgccggaagatcggcaagtttggcctttgcagccgtaaggacggacagtgcctgggtggggttagaaggcaacggcttggactttcgaccaccactgacggtgcttccaaaagtcgacggaagtttgaactgcgagaacgacacagaggatgcaggagcggtcggcttgatatctgggaccaagagttgggtctgtggtgttaagtataaatcgatatgagtatcgtttggtatatacactcaattttaaagggtacaaagaaggaaattaacgagacagacacacacctttccgggcttgaccgacggatctgcattcttcttcccttcggctgtcttacccttcttgacagcggccggagcttcttccttcctcctttcctcctttcttgcctttcgtctgttatctctcaatgctcctctcctcgccctagcttcctccaaaagttgctccttgctagcgacttcatcacctccgtcttctcctccaccagaagcccttgcagcgagaggatcagagtttggacctgtgcgctgaggctgccgtcggttctgcatggatgcaattcgggcggtgagtttctctcgaagggttgataccgaggttggagcgatcggacgaagggtggagggatcgaagggagcagcgtctatctgaggagagtccacagtagacgaggtgatttcagcaccgggcgcctgagaagcaaggatttctggaagagacaggttgtttgccgggtcaagctggaaaaagtttagacgagtgaaggtatggaacaaaagcattaaatatgacctttagtttgaaataccggacaagccccaacacatgcactttaaagacaacaaacgcaccttgtccttcttggccttcttgcttctctccttgagctcttgtttaggaagagcgctttttcgcttgttcttcatgtatttgttatcatgctgttccggtcgtacaatcatgccgtccggacaaaatgatgcgtgtaagtaaaatgtggttgaggtcataagtatacagaaacgggaaaggaggttgatgtacctcttcgtcggtcttttcttccctgatgtagtgtttggcaggaatcaagctgaggagttgctcaaaagccgagttatgagcctcgagtgaggcgagaagtgtagcagccatcgatggcaggtgtgggagcaaggatctgggaggacaaagtgtacgaagtgaacgtccgaagttttacgccgacctagatccttctgggaaaggaatttttcgattctgcgttcgctccttgttactctggctgtgcacggatgtacacgttcgttcagagcgattatgcacgtgacaaattggccacaaatcatcctcaatcaattaaataccgccaaaacacttgcttcgtcacaacagcaacaagagcatataaaattcagacgaatataaactaaggaaacccatgtacttgagagagagagtgcatcgagagctgtagtcaaagtcaagagcagatcaaacacggtactgggcgacgacagtatattctgtacatcgggtatgggcatcatcaatctaagtttcattccgtcttatgtcttcatgtcttacatcgactctctcaccagaacagtccaactatacatatcgctgcataaccaagactccgggagaaagagaagaatgtacgcgcaaaatagggactatcccttgatggtcttggttacaacgagtgtaacctatctttgttaacatacccgtgaccaattcgcggttcctcttcctcagcctatgggcttctgtttctttcggtatacatcctaacctttccatcttaagactcaaacaaccattgggagagaaaggtcgattgatatcttctatcatctttcttcatagtatacacacatacacacacatacacacacatatacctgaatacgctcatccatccacccacctacccgttgataatgcttcgatcaaggtcgcacaatattctcagacggtcgttcgatccatctttcagtccagccaggcttttctcttcttctctcatccgtaaggcagatgtgacattgacgatcgatggaatcagtgtacgtattcatttcggtattttgtgttcttactactggaaattcctccttgatactgatactcactcttgacatactcatatcacttaggtcaccgttcctcaaggtgcgatcagccaccccacgggggaagagtgaccatctcttcccctttcaaagaaacgcttcttactggtcgaagaatcagccagccctgactctcctttcttcctctcttcccttttcgatcttcgtatcctgaaacactcaggttctactatccttcaagctgccgaggctgctggaacaaccattcctcgtttctgttaccatggtaagcagttgattcttttcttctatctgtggtaacgcgatcagaacgaagcaaagagaaacgcgacgctatcgatccagcgatttttgtccatcacgatctggccatactcacaccttcccttctgtaatctacctcacgatcacagatcgactatctattgctggtaactgccggtacgttttggtcctatgaaaccgtctttgctgtgcatctcctacggaggactcggtaattttcccgatgtctaatctcaagctaaactcttgctttccgtctatccctccctgacactgatttacagaatgtgtctcgttgaggtcaagccaggccctcctaagcctcaagcctcctgtgccatgcccgctctcaacggccagcaggtcttcaccaacaccaacactgttcacaaggcccggttagttccgatctttctgccctctcacatgtgcatctcccactcactaacctcgttcgccttcgtctatctcgtccgtcctgttgttatacgccatcagagagggtgtcatggagttcctactcgctaaccatccgctagattgccctgtatgcgatcagggtggagagtgtgatctccaggatcaatcgatgcgttatggatcggatcgaacaaggattcatgagatcaccggaaagcgagcggttgagaacaaggatcttggacctctagtcaagacttgtacgcctccttttgtctgttcctctcttcacattggttcgctgattgactaatcaatattactaataaacagccatgaacagatgtattcagtgcactcgatgcgtaaggttcgccaatgaggtggccggagtggaagaccttggaacaactggtcgaggaaacgacctgcaaattggaatgtatgttgagaaggtcatggattctgagatgtctgggaacatcatcgacctttgccgtaagtgacgttcctttgcccgatactctcccgcccccctctgttgggctcgaattgaccttttgctttctctttacttctatacactgccatacactttcaatcacaacctgatctcagccgttggagctcttacttccaagccatactctttccaatctcgaccttgggaactcaaaaagaccgagtctgtggatgtgctcgatgctgttggatcaaacatccggattgattctcgaggtgtccaggtgatgcgcgttcagcctagaatcaacgatgaagttaatgaagagtggatcaacgacaagactcgatatgccaatgatggccttcgcttccagcgattgaccatccctttgatcaagcgaggcgataggttcgaacctgctggttgggctgacgccctacaggccgtcagcgagggcctggaacgaagcggagccaaaggtgatgagatcaaggctgttgctggacatctggccgacaccgaatcggtaagtgctagtcatgtgtgttgcctgccatgatcgacctgtttatcatcctgatcacattgttatgtttagatggtcgccctcaaggatctgttgaaccgactggggtctgagaatctcaccctcgatcagcccctcggagaccaacctcctgtccatggagtagacatccgatcaaactatttatttaacagtacgatcgctgagctcgataacgccgatgccgttctctttgttggcacgaaccctcgacacgaggccgctatcatcaacacccgattgcgaaaatcatacctgcacaatcccgtcacatttggactgatcgggcctaaggtcgatttgacttatgagtacgagcacattggagagtctactgtcgatctggtcaaattcctcggttctgcggcgaatgacaaggatgccgggtttaagtcgctctttggaaaggccaaaaaacctttgatcatcctgggaagtggaatcgccgagatggacggtggatcggctgtctatgaggcaatcggagcgttcgttggaaagaacaaggatagattcgtgaccgacgagtggaagggagtctctgtcttgcaaagagtcagtctcattctttctttttttcctctacctcagtctcttcatctgagcggaaattgattggtagtgtttctcttttcatgatacccttataggctgcctcccgagcggctgcttacgatatgggtttcaccccgacaactgctgcttccaaggtgacccctaagttcgtctacctccttaacgcggacgagatcgacggatcatccatcccgaaggatgctttcgttgtgtaccaaggccaccatggagacgttggagctcagttcgcagatgtctgcttgcctggtgctgcctacacagaaaaagcaacgacctgggtaaacaccgaaggaagggctcagcttggtagagctgctgtacctcctccaggcgcgtctagggaggattggaagatcattcgagcaatctctgaggtcgttggttctccccttccctacgaggatctgttagctcttcgggatcgaatgtgggatgtatcgcccaccttggtcagatatgactatgtcgagcgaccatcaaacgaaatctcccaccttggatttgccgatctggcaaagcggctgaaaggaagcaagactcaggccggacagaactttgagttgcccgtcaaaaacttttatatgaccgacgtcgtttccagaagctcggtgactatggctcaatgtagccgagcgttccatgacaagtcgtaccaaatctcgctggaccctgatgccgagcagcgaggttcttctcacactgctcaaccccacgcttgagcgggcgtctccttcagatgaatctctcatctctacacttctcgaactactcttctactcttgttgcctttgaatatttgcccgttgtaaacttctttcttctgtttgtcttccactgttcttgatattcgtttgtaactcttcttcttttgtgattatactttgttgtcattctttcctgtttatctcatattgttctttgatttatcttgtaaaatcaagacagacgtttcatgttcctcatcatctcatcggctgctctcttttgtctgatcggttgagaaagaactatgtaacgatctcatgatatacatctgtgttgcgcaaactgtttggaagttttggatattatgcggaaccgaaagtgaaacatactcggcacgtggctttcctcattttcatataatctcgtttaggtttatcatcatcgtcatctctcatctcatcataccatcgaagaagaggcatcttgctaaacaacacacttgatcgacctttcccaggccgaaaccaatcagtcactgtgtctcgactcaaatcacttgacgagcaggatatgctcctcacggcgtcatcttcttccccatcgccaataatatcaacgccgctacggaaatcatcggctcaagttctggtagaacaagaaccttcatcaccaggcacatcatcagtggatgaggaaagggatgcaagcgacttgaagataacaacagcaacatggtcggggaaaaaacaactcttggcttggtggagttattcatttgcagctgaatgtttcgcagctgtcgccatggtatgtatacattctcatgatatgttcgtgtctctatgtacagagccaactgatatgattttcggggtgtattcggatggaaagtcagtgttcatcccagttacactggaacaatccgcacgggaagcagggttccaggctggagatccaacgaagccttgtgttcttcacttgaacaacaccgtctcagcaatggatgctgttatcgccttagaggaagcttcttgtaaagctaggttcttcggggttgttgatattgagcctgcttcgttcaggtctgttctttgctctttgccctatcatatactcctttcaacagaagctgacgagttgcgcattgatacagcctctacacatactctttcgcagcaatccttcaaacaatatccgtcatcaccatgggatccatagcgaatcatccttcccgccgaaaacttctgcttctctcttttgcagctctagggtccttgagctcgatgttgtttcccttgatctcgaatcctaacgctctcagcatactagctatactagctattgcttcctttgcttgttcgtgggtttgttcgaactcgtacataccggatttgggaatggcaggcccagaagtgataagagccagagagacgtgggaggaagagctaaggagggctcaggttgagagagaggagggtggagatctaggtaccggtttgatgatgcctgggctagaattctcaagaggggtcgagcctttgcgaggaccaactgatcggagacaggacctggtgggtcaaacgaagcgcatggtagaagaaagtgactcagagcacgagcaggagggtgaaggggaagaagagatggtctccgcgccgttattgcctgatcaggcactcatagcctcgatggaaactcaacgattatcaaccctccgcgcagattatctccggaccctatcaatctacgtttctcagatatcactcagaggaattgcgattggatacaccggcggcgtcctcgttcttatacctgcctttctcatagtcactgctttagatgggtcaacaagatcattgagattggcagttgggctttcgggagcactttggtgtttggccacaggaccagccgcggtctggttgggcacaattagagggtggaagaagaggggagaccgcggatggaaggacgaggttgtggaaggctggagaggattaggaagaatgatcagcattgaagagatcaaacggttaagaaacacgttttggttcctcttagcttggatgtttttgagcgatggtcagttgatcgtccagtcacaggaaaccggacaaagccattgaactcatatgctcatcaccgccgtttcttcattttgcgttatagcggccaccacattttcatcgaccgcgatcatgtatgtcagccgtctcgcttccgacggccctgatcttgtacactgattccatccatcttctctttgagacctttctagttttgccaaaacatcacttcacatgtcttcctcagcagtgacaatcgttgcttttctcgctcagataacaggtatcttcggtggtttatccgcacccttcatacaagctcgacttggttggacaaataaacgatgtctgatcatactagtctcattgatggcttgtttaccggtctatgggtgcctcggacttctgaatgggacaagagctgtgggaggaatcaggacaccaggggaaatgtatgtcgtagctacattgtttgggcttgtattcggtccagtgagttccattgcgctttaatttcttttcactctatctattctgtagcgcagcctgatgatagattaacaaaaaaaataacaaaaagtttcaaagttttgcaaggacggtgttttctgagatgatccctccgggtcaagaagcccgatggtttggtctgtactccataaccgataaatcctcttctttctttggggtaagtgcttctatctgttcttcctcggactttcaggccataacgctaatctgcctttgcctgactctcgatggttcgaaagcctttcgtggtaggactgatcgcagacgccacaggtgaaatccgatatggattcatctttctacttcttatcctgatcttacctctcccagtgctgatctaccgagtggacgttccagctggaagagaggatgctaagcagtataaccagcaccacgagtagtacaaacagatcgaacaaggaggcggtgtaatacactccttctgcatgttgtaaaatcgttactttgattaaatttcgaaatatatgacaatagagacagtctgtttatcttccttccatgttcgcttgttcaggagcagagaaaagagcgcacaaaagaggacagaggtcaaaaagcaaaagcttatctataatctagatcccaggagctgcgtccttcttacatgttcaatccagtagacagatcgcttgccaatctgtgaacaccaaccccaaatatacacgtacacgcgggagcgaacagaataaggagaaacaggcaaaggatagagatcagcattcaatctcgtaacgaattgaacacgatacctcccaacacgacgaccaatgctccgacgaccgtcactccggctagtggatacctgccttgcggttccaccgccggcgcctgcccttttacttcttttctcttcttcttcaacgacgacgatggcgacaatttggaggatgaagaggatgaaggggcaggcgctttattcgaccgaaggcttggcttggtgccggtcgggggcagttcagaagtaggtttgactaaccccatagtaacgaatctgtttgcatatgcgttcatcgttatcgtcgttgtagaaacaggggtaagcgacataaatagaattgtttgaacggtatcgacacatcaaaaagagaagacgagaatactgaccctctgatatagaaagcatgcaggttcgactcgatttctcgctcgtgtcctttcggaacaccatcaagagtaaacgtagctgtgaaatatagattgttatgtaacttttgtcaggcaaggtgacaaatacttaacaaatcaagaaggaacatccataccagtagtagaatcagatccctgatttaactcaatagtaagaacaccgagatgatcttggcgttcaggaagagtattcaataaagatatcagctaatcaactgaggcatgattgagcaaaagtggccaacgcacctttgggccaagtaggagaattcaaaccccagttgaggacaagtttcttaggtttgtcagccgaaacaacagttccattgacagaaccggagaacatcgagaaaggagcagagggagtggccgaaaattgagcagctgagcgagaccaggtgggaatctattcaacatttccgatcagatatgtattagcgactgatttggaaaagacttgtacggcagtaggatggtttctcgatgatatcggatcaacgaaccttgctctccacagtcagcaaatcccaaagatcggcagcgctgatcctcaagctggactccaccttgacaacgctcgtgttgatcttcttgactgcgccagtaacagacacaggctctgatttggacacgctggatactggagtggctggagttgatgccggcgcgctagcggcaggcgaaacgtccttactatcgacggcgaggagatcctttccgtgcacctcaactaaagtcgtttggaatgtcgcaaagacagtcttgagagcttcaggaaggatctttcgggtcgactggtaggctggggtagaagaactcgaagacgagaaatcgaacttttgtcgttgattttatcgttgtatgaaagtaggcatcaccagattgtgagccatcaatcctaaaaatatcgataggagaaggttgacatgttgataaacacccacaacgtagtccgagattccgtcaatagcctcgtgagacacctcagggattcgcacacttccagaaaggtcggttccgtcagccagtctgcctgaagttgtaagaacaatccgaaatgagaagcaatttcatgcaaatcagtcttgtttcaaaagggtcaacgcagtgtcgagatacgcctacctgccctgtgtaaaacaatcaaaccatatttatgaggtcaatttgagcagaaatataagaatgcgcatcaaaaatcaacttaccagtcaagcttcatgtcgagatcatagatggtgatgactctaaccacaataaataagattggtatcagtatctgaatccaccgaacgcacataattcagacgaaatacgcacttggactttcgctgaccgaccgtcacatcaccatcgatgctggatacgctagtgatagtgacttcgagtccaagactgtcatcagtagctttgacgtttgcaaggttagttcggaactagtagatttcgatatggtgggcaagatcccgcgacgatcagcaagtgcatatgcgtcgatagaccagttggagattgggaaactcagttgcgcagggaactcacccattcataagcccacttgtcgacattcttttgctatagaaagtctcatccgatatgaaagaataacatgaaagtcctttgagtacggtgcataaactgtatagcgatacgggcaaggcaccaattgattatgaacaggataattcaaatcttaccctccagtgccagttttttaggcctgcagagagctgagcgggttgagacatgactggctggggtttgagtgctgtcagaagctttcaaacaaatagaacagaagcaaactagtgcttatggaggagagaagtagagtaggaaatctagagagaagaggtagagatggtggtttggtcaaaaaaaaggagacaagagaaaagcggatttctttcgcgaacattcgaaagctgtgcagattcacgtgatcttcgattttgtaggaaatgtctctttctttacagtctataggtgatctgcagtggggatcatggaataatgatacatggagtagtagaataaagggatcaatgatgggcgatcttgaggggaaggttgaatgggaagaggataggaagctccttctttagtggtcgacaaaagaacaactgcgtccatgacagattgcaaagtaaaaggacaacgcaatggattcgatcctggtctcgacatatgatgccagataactcttcaagtttactttcgttttttgtctttcgacgaagaagctgatcgcagactatccgccccaaaccgcttcttgttcatctctcgttgtctcaataacttcttcgtccccttcaacaaagtcttctttccgctcttgtttttaggtcgttgaggggcaggaggaccttttggcttttccgaagcagtactcgccggaccatttgtaggagcaataaagggagtatcggatggaaagagggatagctcgttggttgcttgaggcgtctcgagcgcgaagtcatcctcaatgacagtcacaacggcgtgttgttcttctccatccgaaaattcctcttctaaaggctcagaagggaaggtggagggtcccgcctcggcattggcttgtgtggacaaggcaaacataacgtacggtcagctacatacaatttcatcgcgggtcagcaaaagacgagaattctcacaagatggctctagtccatatgcacgctcaacaatctccagattctcttgagctcttttttttctctcttgtcgaagctgtcaaggcgcaagtaagatatgtcataagtgccatggctcattgaaagt

SEQ ID NO: 3110 - DNA, 6623 bp, Xanthophyllomyces dendrorhous
gaaagtgatcgaaccaaatggaagaaaactcacttcacgcttttcctcccttctctcattcttctctcgttcgatcgccttctcacgctttgccgctatcttcgcctgctttcgcttgctgaaacctgtcaagaactcgctgtgtatattaatccggaggaacaagcacaagattagataaacatgcgactatggacaagaaagaatgcatagaagaacgaacgctcgagcttcatcatcgaacacgaccttctcaacctctgcctcctttccggcgtttcttctcttttttttaatatacgccgctccttctgacagcaatgacgcgttggatctctttgaaggtgccatgtcgatggatttatatgtgttggctgggtgaatgtgagccatttgggccaagaccagaagcggcaaatgtccaaatctcctaggaaatttgtggtcacgtgtgtggcgacttttaaaagcggtactgattcttcattttcttgcctagtctttctcaccaattcggataggctcaccatacttgcttctttcatctctcctgtttgaatcggatgagcaacactgtagacgcatctcgagcgggaatagcccggatcaagcccgagtctgttcaagattctttgtttgagtttcttttgagtagttctccagctaaatccatcttatctacttattttacccaggtttctcttgactcgaagttctgctcctgttgaagttccagatgatgacgctgctgagaacaccggcaaacaagctgggaagaggactcttcgagaagacggtactgagactctccaatctggtgaggaaggcggggagcgagacagcaagatggccagaggggaaaataacacgcggggtggtcgaggcggaaagaagaaggggggtcagaacaaaaaccgaaaattcaaaagtatgacggacgacattcaaatctgcaacaacatcgctgtggatagagagtgctcgtttggcgaaaggcaagttcctttttcataggttgatgtcgtctcacgcgtttgcaatatcttaatcttcaactttgtcaatcccacgaatattgtgggctcaaattcaaacagttgccgaaggtcccataacttaccgctataccttgctagcaagcctgctgatctagtctttcctgagatgagctacgttgaaacgtcttctccattcctcagcatcccggacaatgccacgatctactgtcctacattcaacgagctcgggttttgccctcaaggctacaagtgtcggttcttgaaggctcacatcaccaagcccgcgctctcgcctactgctgagaaaacaaccgaaactttgaacgcagagacagagagtttggaggagaaatttgtaggcaagcttgtatttgatgaggaacgtaaaacccaaaccgaacaggaaggaggaaagtggagggagaagaactggatcagacccgatttacaatcgcaactgagaagcaatgctgttcgtcctctgttcaacatctcttccgaagcattcatggaggagaatgacagtctcattcaaatctgcaacgtcttgtactatgtgactctaatgcttgatcgaaaccttagtatcctttccctatctccgaggcctacctgtccaccctcgaaggagaccacaagcttccaaagccaaagaaggggaaagtcaatatttccatccctgcgcccgcccagagcgaggaagaggctatgaacggcaacaacgaggagactgctacggaacaagagagcagaattgaagctgataaggacttagtggatgttcccgatcgaccgcaggagaaaagaagactagactggacgggcaaaacttacttggtcagttcatccgacttttgctattctgaagtttgcactttccttgagacgtcaactaattccatcagtcctggctgtctgtgaaccatctgtcttcttaggcccctctgactacgactggcaatcttcctttcaggcgactctgcgtctctctgggagcggatataacatgtagtgagatggttcgttatgacaacgcatctcacgatctgagtatagaacgaacgttctgtcagcttatctcaagtcaacatgtttcttgatagggtcttgcaacttccttcctggatggaggaaagggtgaatgggcactcactagacgacacaactctgaaaagatgtttggtctgcaagtttgcggtagtaaggtcagtttttccatatgcctttcatgaacaaacacatatccttgctgatagaatcatacttctatctgtgtgacagcctgttcaattggtccctactgcggtgcgtttcatcctcggtctaccgactgtttgaccaaattcacgtttcattattgtatccgtggcttatgtattatactttcatggctcttataggaagtccttgccaaagagtgcccagacgtagactttgtcgacgtcaatcttgggtgtcctatcgacctagttttcaacaagggagcaggtgagactgtcatcctcctgaatcctcatctatcatcgatgaaatttctatctatctaactaacggcatcaattttcctctggtcatacaggaagcgctcttttcgaaaagcctaccaagttgggacagatactagtggggatgagcaaagctctcggatctatccctcttacggtcaagatggtttgttttcactgtcatgcttctcccaatcttgacttacttgaaactgaatgatatatacattctgtgaacagagaactggtatcaaggataacaagaacacagctcacaacatgatccctagatttgctaccgagtggggtgttagtgccatgactgtgagtttactaattttgattcaaagcacaggatcatcggcagtactgatattttctgtccaatcgaagcttcacgggcgatctcgacaacaacgatagtatgttacagcttaacatgctttaatagtttgactattgagagcaatgaaaacttattcggatgaggaactgtataacatctttaaagctcgaaattggccgattggtcttatatcaaggattgcaccgagacgctccggcaatctgtcgccgacgcgaactgtacgtttctccccgcatatcatttacccgactattagttgtatcgcgtgcttgagatctcaacgagttgactcattttgttttggatctatacctttataaactcatatagtgccacccattccgatctttggaaatggagactgctatagcgctgctcagtactatgattcgattgagcagactggagtcgacggtgtgatgatcgctcgaggagctttgacaaagcgtatgtcctttgaagccctttcaacacctgaaatttcagtgccattatgagatagggtgacgtatggaactgacttgtcaccttgacgaatcccctttgttctgtgtgcatggtttaatttgaattatagcttggatcttcacgttagtccttttgtctatttgtcgaggttcttatatgaatcttatctgaccgacttattgactgacatttgatttgttacatgtgacagggagatcaaagaacgacgagagtgggatatcagtagtagggaacgattggagttcattcgacaggcaagtcttcatgcatttatatcgacttgggttttgcgtcagatactgactgtaagatgtgtcacctgaattctcttacagtttgctgagtttggtctggtaggtagttgacaactctgaagcgtgatgattcatattctcaccgatactacttttctcttcgctcattcccagagtcattggggatctgatacgactggtataaacactactcgacgattcctctgtgaatcgttatcattcacgtttgtctcggttttcgtttctcatctgaagatttaagaccgtcactgattcgttcgagatgattcacaactgtaaaacatcgttcagccatcgatacatccctcttggtctattggaggttcccgcaaggatgaacgatcgacctcctccgttccaaggtagggacgagttggaaactcttcttggaagcacagaatctaaggtttgtttcaaagtgctcctcgtcttttgttatctgaaaatcaataggctaagcgtgcggcttcgattctcttgtgtcttactacctttcaccaccaggattgggtcaaaatctcagagatgttccttggaccttgtccgccagacttttctttccttgcaaaacataagagcaattcttatggaaacgccgaagagggtaacggttgataccgtgtctttctgtttaggttgaattaagggagggaacaagacgattgaatgagttttgtgttgaattattcttatcattatcatacagcttgcacttcttgttgaaagtataagttcaagagtgatgggttatcgtttgtctgaatgaaatgacgctcgacaaaaaacgaagtagacaggattcgaacctgcgcgcccagagggcacttcctgaacttgctgatatagcagggaagcatcgtaaccacttgattactactccttggatgaacaaaatcgagaaacgaatcatcataccaggtattatagatggtattgagttcttaccaggtttagatctcatagaaaacaactgtttcagtgtggataccgagctatgtaactgaagttcatacatatatctacccctcattgattctctaattctgtctcataaaaagtggacattcatcgttgttaaatgggataacattcagagttgaaagtgctgtgaggcgattcaggtctggactatgattcaagttcaaatgcgacgaccgtaccatgaacgtaagagaacgaggatagacacttcaagataagataactctgaaacctcacgcgtcgacgcgtcaagccgggtcgcgatcgccatgacgcttttgatatgatccacacctcgactaccatacacttcctctcctctactctcttttcctttcccagttcttcttttccttcttccctttgtataacgtttattcttccagcgtaacatcctcttctgtattctttcccacatcaacttctccgtttgcagcgcaaacgcacgacttaaccatagtccatcaacacgattatccacagaaatgacttgtgttgtgccttgcaaagatgtcgatgtatctgagagtgatcttgctggcaagatcactctatatggtgaaagtgagcaatgtctagcacagcttggtgtttaaatcatcgggttgacttcttgattttttgcttacatcacagatacgtcaattcgacctaaagagtctagcgattcatcagacgcgtcttcttattctttcacctgccctattccagcccgtcacacatcctcgatcaatatcgttgatgttgacgacaacgatgatgaggatgatataggtagctgggacgatcgccagtttggggtgtttcgcaagcttccgtttcttggagtgcccgatgatttgaagccagtgatttcaaacccgatcgatattcctaaagatcaatttcttcgagctatgcccgcttcatcagattcgactatcctcgaaaatattgtcataggtggacccaaggtctcagtgacaacttgttcttccatctcaaacgatatttctggcgggccagagttctcaatggtggacgagactaacgaggttttggacgacgagttgaactttacgagcggttctctgccttccccgagcttcaacggatgcgctcaagtaccaagcgtctctgtgatatgcttggacagtgattcaagatgtccagtgacggacactagagaacgttcgggcgagaaagaggtcgaagggcgtccctgttggttggatatttccctggacaacggcgacatcagcgctggcggtgatacgagaattgatgttgcagagaaggttgtcatgatcaaaccatcggatccccttcaaggaatatcatcactgtcaaacacttctaaatatatctccaaacgatttggatcctctggatctccctgtaacaatcccttctcttctcctgccgttcccactacaactgctagaaatgagagtcttgggtcgtcttcctccttgaatctcaataccctcaatcgatcgactccgagtcttacagccgacctttcctcttctttcttctcctccccttctttggccgacttgaccaatccgaatagtcctctgatcgatgtggacgatcaatctcattccagtccgctcaaatcatctcgaaggaatattctcttcacaaatgtcaaaaaggtggatatggtaccacctgctcctttgcctccgccaacggtcagcactgttcaagattccgatagcgaactcgaattcggcactgaacccgatgtcgactctattgtcaacgtcccgttcagtcagtctcgtcgtgttccattcccttactcggctccgcgctcgtctctcggtaatcgctcagtcgcgtccctttcttatccaaagaaacctgagccatcaatcgattcgatttttggtgtccccaagttggatgacaaaatcgcttgcgctacagataactcggattctagaatgaagtggatggatagaacagtacctagagc

SEQ ID NO: 3111 - DNA, 1977 bp, Xanthophyllomyces dendrorhous
tttagcttgcgtggacgtttggtagaactttcaacttctcttttcattttcttccttgttatttctttgtcatgtcaagttggactgggctagaatacgagtgtctgtattttcttccctcatgaaaggttgcaccacgcgcgggatgcgtttctgtgcacctcaagacccctatctggtatatgtgtccttcttcgctatataaatgaatgttatctaacttcacgaccggcttaaaaaatgtcttaatcagaaaccagtgtagacatgcaatcatggaaggggtatctgataaaatatgatcctatatcaagtttgaagcagtatggatgggggagaaatcccattaacggttatgtatggtcatcggagaaacatgctaagaaaaagggggtattgagatgctatgaggtaaacactggatacagttgagggataatatggcaatgaaccgatctggaagaaagaatataatgagaaaagaggaagaaagcatagtttgcgcaagtcagagtggtagcaggccacccgattcttcgagaagatcagagacgtgaaccgctcgtcgagagacgatgtatgattgggtcgcggttgttttgaaatccatctcgatctggtcaagatcaaggcaaataaaattggatataagctcttactgaagagattcatttcgatctagttgtagacgtacacttaggagctgatctgcgttccacaagcgtgaagtacaggcttccagagattgataaagagtctgtataaaagtctcagtaagacggttccttggaaatctatatcagcagatatgagattgatctgatgcactcaccccgatagagttgcactgtagaagcgtggtttggttggctttgaggacagctagagcacatcggaagaagaaatcgaaaccctcgacaaagaaaacgtcccctgtgcagccgaagaaataacgctctttagtccatcagtatcactagcgagaagatacagaagctgataatgtactgacaaactcgaaacaaagtctaaccgccagaaaaaattgggatgatcagtaggcgtgtgtattgatatatgggtcaatcaagaactaacctcaacgggcactgtgataccatgtgtcaaaccactcagttagtggcttttgcctgacgatacaagagatgaaggatatacaaaaactcacagcaatcagtgaaaagagataagaaccatccgaaggagacagcagcaactacaaaaattcacgcgaacaaacagaccaaaatcagacaggtcaatatcaaaaaaggtgttattattctgaccttcaactcccagttcggtcagatgaatatctagttgaggtagttcttgtttgaggagatcttgaaggacccgctggtcagcccgagaacctggaaaccccaagcagaggaggcggatgagtgaaaactctaacgaagtttggatcgagaaagaaacccagaactgacacaatagtgaaggagagtagtaatccggaggcataagccgctcaaccatgcataagaatacccagaagctgttgaaagatctttagatatcagcctggatgatgtttttttcaaaagcccggtatgacagtccaacttacgcttcctcctcgcgttggtaaacaagaagcaaagtagctgccaacatctgtagacaagaatcagccagttatgcattagttcccaacaagtgattaggctatgatgattctacagtaaactccagtcttacattcataccctggcagtatccaaccgacatattgtgcctaagggttggttttgtacggtggtttaagatttgtcagaatattagtctaagcgcaaagactaagttaggaagacccaccaggcatatgcagtaagtagtctacgaagtttcgccactccgggcccatcccctccaaagaaaacgttcaagggctggatgacgatcatagaaatatacaaaatttcagcg

SEQ ID NO: 3112 - DNA, 22380 bp, Xanthophyllomyces dendrorhous
gaaaacgtcacactgaccaatgttcggaccacgtctttctcgatctcggccagaacagtagagtctacgccttctttttccgcttgggtcagaagatcgttgtaatctcctggtgccatgacttcctgtgcgccactacactccatccaaattttgggccgataagcaattgggattccacccctaaccaactttgcaaactcctttctttcttccttccctgttttcccatgatttcccatttgggcaaacccaatttccgtccatttggtgtcgtccccttttccagccgccattgagctagactctcttcgtctcctcaggtatgcatcccaagcggctgtctgatttgcctgttgctgttcatgaacagttttctgttgattgaggaggagttggatagtcttgcgcccagtcagatgaagaccttgtcgaggagcagacgagccatctacttgaggaacatcagccttgacgtgaagtttttgtgaaccattcacggctcgaactggagaaggattgagagagactgaggtatgggatttatgtttgcctttggcgcccgcgctcggcttagagaatgtaggagacatcgtgatatctggttcagttcctgtcgaaaccactgatacaccggatgcagcggagactgtagaagagtctttgttgaaagaaagagtggctaggtctttctctgaaataggacggctaggtgatgaatttttcactctgatattttgttccacccaatcgtcttcttcttcaggctcggcattaggggcggtggctggtaagccggcaaaacacgccggagcaggtgcccctgcttcgcttgcttccctcaacatgttgatgtttcgaacatctatacgttaaacaaagataggaaacccagacacgcttcgttagttaagaatgagaggtcaagaaagcgtgtaactcgtaccatagataaagccgtatcggtctaaaatcccggtttgcgattcataagcatattcagtcaagtatcttcatctaaacggaggggcagtaaacctgcgacgaaggcaagactcaccagttaaaggctccaagccggtatcaaaccttgaagccgtgccgctcctctttttcttcgagttttttctggaggcatgcaagaacaatcgtagttccgatcgattggacaacaaagtcggcggtctcaattctgtaggttcgatcgcctcgagctctacagagggtacattgggtgatgtccctgttttcactctcgtaaccggcccttcagctgtcaaactatacggattggaagatctattcgtactatggttcttgtctgcagaggaagcgaagaatccagttgaagggatggattttgccgatgtctttgacggatagggatatgcagcggagctcaatgctctgcttaacattgacgaggcagccaccaaaggttgtccggaagagattgatgtacctttatctttgacgacgagagtagatggttgggagggaggaatgaatggtgaaaaatttgaggggacagaagactctctccgcgatcgagtcgtctggttggatggtcgtctctgttcagacacggtgatcccttggttccttgcattggaaacgagttcgaaagccaagtgagatatcaagggtgaaacagaatgcgggtctgaaaacaaagaagctgcctcggtcgataagagcctagttgataaaaatagcgctcggaagtgagagggaatgactcgataaggttgctcgccgggtgtcgtttcatccgatgttgaggacgactcctccagaaagcctgatctactgtcagaatttaacggaggagatcgatcgagtggtgagagataccctttcatacttccttttgatgataccgacgagggcgccgccttttttcttgttgattgtccttccgatgaagagctctgtttatccgttatggatccagaacctggccggtctctctccttcgctggacggctccacatagatcctataccgagccactcgctaaacgttgactgagctcgctttcgactatgtttcttcatcgaagttggactagatgatcgttgatcggttgaatgcatggttgtatttgacttcgtgggtgtgctttctccgatattatgtttcctacctctagagacacttcggttgggtaccgagtgaggggattcagaggagcttgatggagcggatagtatagaagtaaaagaggcgagagtagatatagagtttcctcgaggttttgttctcgagcgcgtaggtggaagggagacagtttcagtagaaagcttcttgacaggttcgatagagtcattcagtgggggtagagaagatgaacgcgtgggcgtctctaggtaggttaatgggcttgttgagagagacgttgacagcgcttcatgtagatcgtaatgtagtgaatcgtactgttgagataaagatatatgttatcgagtcgatatttgacaaatactcgagaacaggacgacctacctgatcatcatccatcgctttgattggtccaccttgcggccttgccctcgtttccttttccgcacgctgtacctctagcttccacaacctccatccgatccgagccaacaccttcatcgggtgttctttgtctgtcggactgggtgggaacaggggcttttcattcccccctttgaatcctgtaggcaggctggcctggccatcttgattgaacgatgactcccagatgacaagcgcgttagttagctcgtcatcagccatcaaatcgtaccgtgcattcagtacttcttcctcctctctggacaagatcgaggggattcgactcgttgacgatgacgacggccgagtggccatcgaggatgaaattggatctatagaccgagcgagatcaggtgtggaagaggatggatgagacaatggtgactgattgatagaaaccactagaggatctttgtcttctttcggacggcgttggctcagggtagagggttttgaaggaatgcttggtcggtgggcaagcgacgactgtgaaggaaatgacccaggacttcgaagaggcatgtgcgaataaaatcctggagagcttggttgggacgacggggcggtagcagcagaggtggaaataaagttattccaagacggagtagtatcatcagaaggagaaggagaggggaagccaaaagcgctgtgtctggctgtcaacaaaacgggttgtagtgactgagagagttcttccgtttgtttctttagatcaaagtatgaagccggaccagccgtggatgaatctagcgatgtatggacagaagagggtgtatcagtgttctgtttgttcaagatcaagaccactccgttcttgcacacacctgaccgaccgtatccgttgacatcctgaggatagctcgactgtactcttttcgacttgtaatttggtcggatcgaaggtacgagtgagagcgggtgatgtagaggtagagcctctattgggagagacccagtcgtcgcacccacttcatcgggctccatatcagagtgacaacgacagcagatggcttttgttccttataagcgaatctgtccacgagtgaatgtatgagagattgaaagtaccaaaagaaacggaacaagaaggtgagggttgatgattgatggcggaaacacaggcagatgttgtttcccatctggtcaccctcgtcatcacctgcattgagtgaataagatcagagaaccgttcgtcaaagcgctcaccgcacaagggacaatcaagtacacagtaaccggagcacgggagctcaatgattcaagagctgctttgtatgagagttcattttatgttcatgaacaatgtcgatcgtgtgtagacaagcgacaactgagaagacgtatgggtagtatggatagtggcttcaaactcgagatactccttatgtgttcgcaacattaaacacttccaggcatgtatagccatacaagatatcatcttgtgagaagtgaagcattctgatctgatgtagaaagaatcaagcacactagatgcccagtgacacagaggtcaaaggttgaagagattaacgatcaaatcaagactcctttcttcgtctgaccgatcatcccattctggtctatcgattggtagcatccacctcatttggacctcagctagacctcaagaaggtttttacaattgatatattgcctttcaaggtcaagacatgtgtatgtactgttctttggccgtgaaaattgacttcttgatgttgcagcagcttatacacttggtacattctcgtttttctagcctcagatcttatatcaaatccgatatcaccttctcactctgagctagaggcaaagccaaagccagatacagagccagcatcagcgctagaatcaaactttgaaaacccagtctcttcaactaccactgcatcaactcctgaattcatcacaccttctacgtcctcctccacagcagaagtcgcagtagaggccagccggaaacgctcgaaatgggaagaccaggcggctagagaggatgagctcgcgatcaaaattcgaaagaaaaacaaactcgccgcccaagagagaaggaggagagagcgaagtgcagaagagagggagagagaaagcagattgggttcgtgttcttccctgttatcgttctgccctcgctcctgtgttaaactcatgcgtcggctcgtttgtgtctcattgcttcgatacatcctcccagcggctccgtcaacatcgaacacgtcctctcaatatgccctgtcttccgttcccccggcaactacgaaaccgtcaactcctcgttctcgtgaagtcccgaccatatcgacccgctctgcatatgttcccagccggtcatcccatccatctatccagtcatgtcggtcggtatacgagtatgaacggttaaaccatatcgaggaaggctcatatggtgtcgtcttccgagcaagagagaaaaccacaggcgaaattgtggcgatcaagaagctcaagctggatgaagagaagaacgggtttccaatcaccagtctcagggaggttatggcgctcatggtgtgtaggcacgagaacgtagttggagtcagagagattgttgtgggggacacattgacccagtcagtaattcatctggtattgcctctcttgctcgccattgatcttgttccgttgaccgacatgacgtatatgtggcaaatccaaacaaacgaaacatcagaatctttatcgtcatggacttcatagaacacgacctaaaatcgcttctctcgatcatgccagccccgtttgtccaatctgaggtcaaaacgctcctccatcaactcctctcagccactgcacactgtcataccaactggatccttcatcgggacctgaagacatccaatctgcttatgaataaccgagggatgatcaaggttgccgatttcggtcttgctagaaaatttggagaacctctgggtgatatgacgcagttggttgttacgctttggtataggtaggttatatcattcaagttgcacgctcaagagaaactgaattaatctttgtgttctgcgtccctactatctcttcctctcatcctggctgggacacaagatcgcctgaattattgttaggaaagacagactactctaccgctgtagacatgtggtcgataggctgtattttcgcggagcttatgctcaaaacacccctgttccaaggcaagggagaaattgagcaaattggtcaaatcttgaaattacttggataccccaacgaagatacctggcctggttggtcgacgttgcctctggccaaaactatcaacttttctggcccttcgttcgtctctgcttgcgcatctactgtgtcttgactttctctttgattcactattatacctgttcttcttgttcaatgcagatcttcctctttgccgagcaagttccgtcatctaaccgaaacagggcttgatttactaagccaactgctctattacgacccggaacgtcgaatttctgccgaagaagctatgagacatccttactttctgttcgtacccagctttgccttctcatcctgatatttcggttgtgtccgatctgtgacgaaactttattgagacttttcgtttgttgttttggccggtgtccatcgcgattgtgttgttttgtttttcttgtagggaagcaccgttaccgaaacacccttctttgttttcgtccttcccttcgcaagccgctggagaaaggtacgtattcttaagctcaactcgaatgtttggttctatatcgacgctgataaacctttgtcaatgtttgatcgaaattcttagacgccaaaaaccgtttgaaagtccttcagctccgaatcatcggcacgaaagggattaatgaacatttttttccctgactttactcgatcctagacgatttgtataagagatatgaaaaatagaaagcaagctgcatatatgttcataatctattatagaaaccctccgaccagtctctctccctccctagaaaggcaacgtcgggttctcaattgttttgtgggtgtatactttcttaccctcttcagccgatccaaagtctaaagagacatgtccgttatcagctttgcttcgcgcgaggtacttgtaactgtcaagtccacatcgataatatccgtcagttagcgaacagtcaatcgctatttcagatgtatagaagaaacaagggcaaagggacatacatgcataggccttctaagcccacaggtcctctggcatgagtctttcccgtactgatcccaacttctgttccaaatccgtatctgaatccatcggcaaatctggtcgaggcattccagtacacaccagcagcatcgcatcctctcatgaaagcctttgcgatcacttcgttctcggtcacaatcgtttcggtgtgcttggagccgtgttcggcaatatgattgattgcttcggtcacgttgtcgacggttttaacggacagtgtaggtgacagatgttcgatatagtaggtttccgggatggagctatgaatttgagacgtgtgggaagcgagaacagaggagtggagatgttctcgagtggattcatcgagataaagcgtgatgttattggaaagaaggttggcagagagagtaggccaaaggctggtaagcagagaacggtgaatgaggagggtctcaagagcgttacatgcggccggatagctcaactgttgttatgttttttttttcagttgatgaaggcgcacacataagtacttatggccgatgttgaatatagaagaaaaagacagacctttgaatcgagtaccaccctttcagccttagcagcatcagcactctcatccaaataagcatggcacagtccatcagcgtgtcccattaccggaatcttcgtctgacccttgatgctcctcaccagctcggctccacctcggggcatgacaaggtcgatgaatttatcctgagaaagaagggttgaaatctcggatctggtagagaccgtctggatgaacgtaggaggaaaaggagtgctagaaagagctttctgaatcagttgagaaagaatagaggtcgtatgcaaggtttctttcccgggcttgagaatggcggcatttcctgtaaggatagaggcagcagagagaatttggtagaatagcttcatgagtactccaagtcacttccgaaacggatagagcattaacttaccgctcttcagagccaaggaagcaatgttgacgacaacctcaggtctggcctcaaatataacaagtaagactccgatagggcaagtcactctataaagctctagtccgtcgtcaagctcctttgcgtaggtgatctggtccgtcgggcagggaagctgggcgacgtcaagaataccctgaagcatcgaatcaaacttggaagatgactgcaaagataatctggagaacatggacttggatatgtttccggactcgactagaggtgatgcagcctgttatcataacataatgagtcagcttgcattcgcgtttggttgaccgtcaaaaaaggctcacatcgaggtccttctggtttgcagatagaacatcgtccttgttgtcaatcaggatctgacgaattttgagcagcgcactatctcgctcgctagaatcaatcagctgtgatgcctggtaagcggctcgagcatctctggcaacggtctctgctgggttggacattgaggaatatgattgatgatacggaagattgtgagtgtataaagagcaagaagtaaaggtaaaaaagaacatgaggaatggttagggttggggtagtcaccgatgagtcagacgctgacacgtgacgtctgcacgtgactggtcgggtcggataatcgcgtcgcgcgtcgcgtggaattttcatccaaccgatcacacctctatcattgagctctaccaaatctatcctgtttctttctcctctccatatcagctgcattgctctatctacagggacacatcaacatatccataacatctcaatcaatgtcatccacagagtatgttggcttgttttaattcatttatactgccaccaagtgctttgaatacacgcaagcatccttgccttctacgtcctcgcgctgttcctatagagactcgtactgatccgttcatgattgaacatctagctcgtccactcagaaagatcttcttcaggccaatatcgatctgggcaacaaagcctttgtccttagaaagtgggatgaggctgctgatgcgttcactactgcactagagatatggtcagttatctattcttgtgaaggtcgaaagctccttcatcatcgttctgccttcctttctcttcaacgtctactgattttggtcatggatttcttccgccccacgaatctgtttatcagcgcctctatctatggagatttctccgccgagtcggctgacttattgctatcctacgggaaggctctccttgagattgccaccgcccaaaaccaggtcatgaggcaagaagcaggtgctaacgggggtgaagacggaggttccgatgatgatcaagacgaagttgaagaggaggctcgtaagtgtttttctactttctggcctcttgtattttgttcttttccgatgcagacctcattcatgcggcagtatgtatcatgttgacatcatgctcactcgaatgatatgaccacctgtagtccaaatcgctgcatcgaccgcgtcgaacgtcaacaatcactttgacttccgagaagaaactcaagacgtcatctcgacgaccatccccatcatttccgctacatcctcatccttcttcgtccggcgcagctgacacagttattggaggtacggctctttcaaacgattctgccaccaaaccttcaggcgagcctgaagaagaagatccggaggatgacttcaatgccgcatgggacgttctggactctgctcgagctctgttccagaagaaggaaggtggcttagctagattacaagaagccgagtgttatcttaccttgggtgacgtcagtcttgagaccgagaattttgctcaggctgtcgaagatttccagtcggcccttgcactcaagtccccaatccttcccaactcgtccaggcacatctcggaagcacacttaaaactggcggtggcgcttgaattcgcgtcaatgttggaggatcatcaagctcgcgcattaggacatgttgagctgtccaaggcatctctgctcgaaagaagagcagagttggaaagtggcgtgagtgggtttgaggttggacctgaggagagcatcaaaggaaagggaaaggagggaaagatcttggctgaagacgtcgtcaaggatcgagtagagaaattgagcgaggaggagaggaaggctgaaacaaaggagattgatgagctcctagaagatctcgacctcaaggtgcgttaacaatccaacatcgctaactttatctttgactaatacccgtgcactgtctgtcctacttgtacgttctgcatatcgtacgaaaacacctatggatcttcagattgaagaccttcgcatggcccctctaccaaaaacaaacctggctggattgctccccacttcttcatctacctctacctctacattcaacgcgttcggcggtcctttcagctccagcgtgagcgctgaaacgtcagtctcagcatcccaggtgaacgatttatccagcatggtaaaaaagagaaagacggcggcggcggcctcctcgtcgtcttcaccggcgactggaaaacgaaaggcagatagcgagggaagcggaggagaaaagaaagcgaaaatctgattcctggtcggatatatcattttttcaatatgtcgatatatatatatgtatgcgcgtggtttctctgtatataggtggaaacaaaaacatcgtcgagtgggtatcattcactataacctcctccgtagtctcttgttggttcttcttcatcactctcaatacctacaccttccatctgactgtcctcccctgaccttgcactcgtgtcccaataagcatgactctcacccggcctgacttcctcactcgtctcttcgatagttgtcctactctgttccccttctgcgccgtcctgttcctcttcttcttcggttccttcttcgaccaccatactttcttcttccccgtcagataagaattctccgtccgcttctggtcctcgcttggcgcccgccatcccaggtgggatctcccttcctctttcttcaggcaggacgtctctaagaccgagttcagtccagccagtccggtatgtatgcccttgggctgtacgtgggtgggaaggaagatgattcaaatgtcggccaatgaggagagagggcggattatgttgcgttggtattgagtacggtcggccatatggatatgaaggctgtataaaaacatgcgaacgagaagagaactcaatgacggttgccaaaatgtgtttgtaacaagaagacaagagaagcaacaagactaaagcgaaactaacgtgtgctttggacggtagagctaagatttcacagaaggtcaaaaggatctgtgtgaggataagcttgctcgcttgtgtgatgagaccgatgccagaacggattcgtactttcatattcgtcgggtttcggagggtccaagtcaaacggaattggaatctctacagacagagttcgaagaagcaacatttcagacaaacgtctatggtcacctttgccttttctgaacaacccgaagagggccaacggagctggccgaaagggaaggctaggagaaggaagcacacataccatcatcgaatgcaggaatgattccaaagaaatcttcttcctcttctagatctaatgcaagcagagctccatctgacatatggatggcagaatatcgaccgtcctgtggaggttgttttgaggggcgtcgaggatgagccaaataaggtatcatacgtgtgaatctcgagctcacaaggaagcacaaaaggagcagaacgaacggtcatggtaataggatacccaggatgcaaggacaaatatttctggtaaagagaagaagcagaagataggattgaaaggggagaaggcagattgctagtttaatggttggaaggagaacgaggatatcattgatttcacttccatcattaattgacggccatcggacatcgaccatcgaccatcgaccatcacctatcggatattatatttccatcctcttctgagagtgaaaagatcctgttcatcatgtctccttctgttcctctctccagtgcttcttctgtcttttcgaaagctgcaaagtcaacatcaatagtgtcccatcctcatcccatccgtgcattctcctcggccaagaaggaatgtgcagtttcagtaagctttccttcttaatccatcatctccccctctgtcacctcacatacagccatacagaatctgaccgaagctgcttgtgataccgcgtgttgtgctcagtcaacagcttacggacagtgcatcctcgcacgctacaaggatgtagagagagggatgtgcgaagcagagtttcaggccttcaaggcctgtatacaggtacgtcttctttctctcctcctcttgacacacttaccagaagcatgaagacctaagtatttgtatgatctggatgaatcgatgaacagaaatcgataggccggaagtggtgattgtgtcatagtgttcaacgatctttgatgttcatgtatcataggctttccattgtagatgtacggcagcccttcgtcttctcttctcccgtttgtcgatcgcttcccatctagacattgtatttcgaatgaccttttggtcagatttcacccatgtacgattgaagtagctcttttgagccgatgtataacgggatctggatatcaatgtatcgaccgggacacctatcagaatatacaattgccagtacttctgaacccttagctcatagagctcgtacaatcgtacggaaatgaatatgcaagagaaaaagaaaacatatatgaatgattaggtatggcatctacccgcccctgtctctcgcgtgggtccacctccaccgccaccgccgttttctccctacacgttcgctctccttctctctacgccttcgaatcattctttgatcgcgctcattttgagatgctggattgcccttgcgcgcataaggtccgaatcctgtcagtcgagaggtcaaagagaagagctcaagctcgagaatgggttggtcgatatcttcttctggaggctccggggtaaggtacacgctcggaacagcagaagatgatgcaaaagagaaagaggaggcggctcccgtggtgaaaacaggagcgtgtgcttttgagtgagaagacgatgatattggagatcgatgatgctcataagaagatgagggtgacgaaggggacagaaagtcgatatactctaatgaagacaaggcatcggacgtagattcgaacgaaccacctgcttctaggtcgtccaacaatgtacttgtatttgagctcggagaatctattgaccgggttgtgatcgatgccaatgttgaagcaggcagagggggaggagtggatggaggagtggccatggttggaggaggattgtgaccagtctcgtatgctacgagaaggcatacgagctgcagcacaaagatgaaagtcgattgcaagagaacctgagtaagtgtagtaggtgtggctgttgttggcatacacatcagccatgccttcttgtcttgaaatgccgaaccagaacacgaatacgactatcagcagaggaacactcactctgcccgataaagttgagaaagagccctctaggccgtgaaccaaaggtagctgagggcccgtacagaaaatgacggagatatatgccaatgttcaaaaggatgagataatttgtcaagttaggtagtgagcgggtaggcgtcgtcaatactgggttcgtgagctctataaacgatgatgcggccgggagttcgtcatcacagaagcgcaatcaatcagaatcagcccagatttaaagggattgaaaacgatacgagagagaggaacaaacgaatttgaacgaccactctgacgagaagaacaaagaagcttggatcacagaagtaggagtagaccgacagagcgatcaccaatctatccagctaggtgaggtaaaagagttttgattgatctatcattaagctgagctattaacgatgtgggattagcgacgatgagacaaactagtgcctacctgttctacaagatcagttcgtttctgttcaagcatcggcgagaccatcgggacgctagaacaaagattgtcagcaccttcgtacagttcgccaagggatataggactgacggaaacatatatcctcacctgatgtatatcaacactccctacacaagggctttgaggatcagcagacacagcttgtgctcaaccaaaacaagcagagaagaatgaaacgttctatagatagagagaatatcgttgagctatgtgaagcctctggtcggacactttgacggccaatgatcgagatggtagtgatgaagaaacattcatcgtcaaagggtccgctcgcatcatctcttcagctgttcatcatcagcaccaccaacatcatcacaactattgacgctctcaccagattacatcgttgttcactcctaggcgatagatctcttctttggtctgccagctctcatgtcgcaaaaggatacctctgtctctgtcgatgacaagcgagcagactcaactattcacgacccatctgcctcaagagagcctctactgagcgcctctctcacatccgccaagtcgctcgttctccttcaattgctctctagactcatcacatttaccctcaataatgccctccttcggtttgcttcgccagaggttttcggaacagctgccattcagttcgaccttgttggttcgacattgctgtttttgagcagagaaggagtgaggggagcgttacttcggtctgggaacgcgtctgttaagagcgagaacgaagctgggagcaaaatcaaggagaaggacgcgattgataaagataagcagacgacagatctgtcggtgaacgctaggcagcttagcctaaacctttcgctcatcccgcttgggctttttattttactcggatgtacgattgtacctacatacatctattcatcttcgcgcctgacgacgagccagccgttcttcttaccgtctcttctgctacatgttgctgggtatctgatcgagcttctgtctgagccatactacgtacaacttcagacggaccttatacttggcgtccgtgttcgggcggaaggctcggcagtagtagcaaaggcagtggtgacgtttgggtcggtctggttcttaggagagcgacatgcgcttctagcatttggactgggtcagctcgcatacggaggatttatacttggagtgtttgtccatcatttcggtctgagaagagcagcgaggatgtggattcccaagaaagtgtcgggtagtctcttgggaacctatgtgtgagtgcgaagaactgatgagcgaaacaaagctctagactttgatcactatcatgggtactattctcgtatacttacctatggggttgacactttgatagctactttgaccagtcatcattcgcattagcaaaggcgatgaccttgcagtccgtggtgaagcatttcctcacagaaggtgatcggatggttgtctctcggatcagtcctcttgaggaccagggagcatacgcaatcgcgacgaactacggtaggtgagaatatatgagcttggtagacatcgttcacacataatgcttgctaatgattgtctctcttcaacccttctgataacggaatatccatatcatccggaacaggctctctggtagcgcggatagtttttcagccagtagaagagacagctcggctatactttgctcggtcactatctgctagaaacgagcggggcaaaccctcagagtcaacttcgacctctgtctcggtgtctgattcggatgtggagatcgcactgacaatgctagggacgctgctccgactgtcagctcatctggcggtgctattgcctgcactcggtccaccattcatcccaacggtgctctcgatactactaccgtctgcaaagtggtctggggagcgagcgcggacacctggccggttgctcgcgatttacacaatctacctacctctaatgagcgcaaatggggtgctagaggcgttctttgcagctacggcgaatgcaagagagcttggaagacagagtcgatcgatgtttgcgttttcgatagtctttttgatgtttgtgggtgcatatgttcggctgggaggaggtcgaccggaggaggggcttttgtggggaaacgtggtgaacatgatgtgtcgtatcgtgtttgcgctcgaccatgctactcggtggttccggttgcgaggcgaaggcaagacggacacgctcagtccaagtggcttgatgccgggggtgaaggtcatactggtggctatcaccaccgggctagccgtccggttgagtgagcggctactgatcgctgggcaagtgcagcggtctaagctagatctcaggagcacgtgtggacatgtgctcgtcggtttggctgcaggaggaagctgcgtagtcgcttggtgagtggtgtttcctccatgtctttacttgctccggagtattgtatgcctttgcgagactgacttatcaacgacatttcgatagcttcttttccgaaagaaaatctgtcgtggcagcgctccgaactctaaaaagacgtaaaatagactaatgagaagatataaatggtattcagagagaaagtggacacaacagaggagaacgatattctaagaaatctttgatacgagcgttgagaaaccgaacagagggtagagaaggagaagagacgcgtcgattgatcgaagacgcgccatggacgttatgcgaaagttgcacctccacactctgcagtctttagcttcctttcgtcctgggcaaccaggacatcaataatatcgaatacaatacagagaagattagcattgcccctgcataaggatgacacgattcgatcagagtggagaccttcgggtcaaattatttttttaactcacatatcctcatatgtgcctatgaggatgcttgtgtactgccattctttgatgcttttcctttcttcccttcttccctttctgttttgatcgcaaagcaggatctcctgctcaattgactagccttcaataaggattgacacaagtgatgacgatcacgtagcgcaagaaagggtagaaggcaagaaaggcgaggaggtgaggaaaaccgccgcagtgaaatgcgagacgacagaccatctcacttttctaagatccttcactccttcctctcatctttcatcccactttcttcttctctcttggactgtcttataagttgattccatcaccatgaagctatcttcgcttctccttccggcggctctccttttaagacccacactctccgctgctctttccatcaaagctcagcgatgggctcacaaggcagcctcatctccggaccacgttgctcagctcgatacagcttcatttgaggatctaacgaacaataaggacagggattactctgtcactgtcttacttaccgctcttgattctggcttcaaggtattttcttttcttcttggtatccgaagttgtattcttactgcaaagaggaaaaggcttattcttatatctggttgtgttcgtatttgctatcctccctgttctccatcatcaaagtgtgctccctgcaagtgagaccagtccttcttcactctctgattgcccttgggttattctgatcttgactaaaccttcggccctttgatgttttaaagagaattcgacccatcttacagagccgttgcctcttcttggggtcgactgccgaaagatgttaggtccaagcatatctttgcttcgctagatttccaacagggtcaagaggtttacaagaaggtacgtgccttcgagatctcgttttgtcaccatttgacactgattttgatcatccctctgtcaaaacttagtttggtttgacttcggcgcccacggtgttctacttcaaaccgactgaaggcgatcgagctcctgaagatggaaagacgggtcctctgatgtacgatctcggccgcaagtaagttttcagagcatctcagcaatccaggctgctttctgctcatgtttggtcactcgtcttttgatcttggctgatcgagacttttctcttcattatgatcacgaattcccctgctcagcgggtttgggccggagaacttgctgaaattccatcaggcgaacatcccagctgaattcgagatctataaacctaaaccttgggcacttatcatctccacgcccatcgcgtaagatccttctctttttcaatcatcaggcttgattatccgtgattcttaccggccgtcctgtcatgtcttgggttcctttccttcatctcaaaaaagagtaattgcctcattccgaagtctttaccaataccgatcactctttcttcccatcatcacttccaaacacctctggacggcagtcaccctgttgctcgttatcgtctttaactctggatacatgtggaaccgaatccgagatgcgccatatgctcaagtggacaggcaaggcagatctcagtggatcatcggtgggttccagcagcaggtaggagcggagactcaagtcgtaggcgccatgtacgctggtctcgcttttgccatcgtagcgctctccaacctagtaccatcaacgagggatccaggcagacagaggatcggcgtcttcctttggtcgggcgtcctcatcgtattgttcagcttgttgatgagtatctttagactcaagaacggggggtatcctttccgcctcttgttttgaaactctagcggatgggaaacgagagaaaataacaaaatactccggaaggaagaaaaggatccctcgagatagtctatcaaatccgaaaggaaatgttgggctgaagaaaggagatagataggtagtggtttagtttcacccagatctgatgattctcttttcttgcaaatcaagggcatctctttctctgtttcgtttttccttctcctcatcttgaactagaatgatttagagcatgaagagaaaagagatggaaggtccagaaaaggctagaggaggagttttaaagattgggtatcatggtctcgtgattcaaaaagatggagaggtaagaaggaagagcggtaaaaaaggtatggtcacaagcgaggattctcaaagataagaagattgagatgagcctaggcgtgagaggataacaaagagatggtataaagcagtgagcgaagacatggaaacaaagaagatggaatctcaaggttcagcgtcggttctgacttcctgatcgctgatacgcggcgagttggtcaagctctgcctcgagcgccttgatcgatccgtgagctgtctcaagatctttgttcagtcgatctctttcggcaatcaactgtttaaacatcccaattttcatcatattttcgatcagtcttccggccgctcttttgggtttccacctgttcttggctctcaaatgaagcaagagacgtacatgctgctcccattgtctgaatcgactctcctctagcttgacttgttcggtgaaccgctttctgagcatctcctcttcttctttaaacttcgggttgtcaagcttcttaaccttggcttctccaaacttccgggtctccatctgagactgtcggtagttttcgtagtgggcgtcctcggtcgttgagatgagatcgagcatgtgggttcgaatgagaagggatcgaagcttccggaagtcgcagtggtcctcgttgtccactgaggaggcacaggaggaaagagtgaaattggaaaagatgtcaaaactgtttgacgatataagagaaaatgatacgccgtggacgaaccctcagcaacaccccatagatattctcgacctttgacaacccgtccatctcgagtggtgacatcttgagtggatccgatgattgaaaacggcatggcggccgtcagcgtacgagcatgctctgccgatgcagggtcatcctcctcaatcggaggctggtagatcttgattccctgagcaacgatgacttcctggatctgttgaagaaaaggaggtacaggaacaaacgaaaatcgttcagtgcgcttgagactcgatgtcttatgagatatatgcgcagatatcaaacgcaactcgttgtttgaagatagctaaatcttcgggcgtcaacgtatcagctttagccaccacgggaatgagattaactcgagtaccgaggcgcttcataatctcaatgtctagcggcttcaatctgggggtcatggaatgtcgcgatagagagcgtttgtagacagcaacccatttcggtcaacaacctgtcagcgcgctctcaagtctgccaacaggacgacatcagacgtggagaatacgtacgtgtgtccagtcggtcgcacaaagtatagacacgcatgaaccctaagatctgccttctcctctcgctggggctgctgctcctgacgcataaacatctcgtgttggtcgtccacaaactccacaattggtccccagctgttacaaatcaacgagagtgattagtaaatgctctcgctatccgttagaaaacctttttgttgtgaagcatctagagaacttcggaagagaaagtgatttacctatctcggttgttgacgtagtcaccaaatccaggcgtgtcaatcacagtcaatttgactttaaatgccttttcttctagctgtggagaggaagagttcatgttgattaagtatatgcgcttgcatctagcgtttaacaacatgggcctatagctgtttagagaaagggaccgacctcagccttgatgatatctacctcggtcgtcttgtctagttgctttgagaatcgctgtcgatagttctttggctgagagagctcggtagagaacagagtgttgataagcgtcgtctttccaagtccggattcgcctgattaagtaaagagatggtaatggaggggaagagagaaaggtacacagggcgacacaaagtagaggaaggtgtcagtatatgctaaggagagaacttgacgctgacaagtctgtgggttgacttggctctagctctaacaagcagtcaaaaggagcagatgtacactgtagaatagaacaataaagaaacgtaccaactaccataacggtgaagtgctatagagatccattgtcgggcatcaacaatgggatttcaggcacgagcagattgacggcaagcaccaaaaaagagacacgacgagtcaaatgatcagcaacgaatgatttagatatgtgcctggaggagctcttgaagagaggaccaatagaatggcccatgtagatgtaacacagggaagagaagaacaggaagaaacagtatgaaaaacaagatagatgaagccactgaatgcacttacagcccctcgtttagctacgatcttgtgtcgctggttgggtaggctgaaaaagcggacaagagcgtgagtaccttgtatctgaccgatggaaagaaacgagaagatgaaaagacggaaggctaagtactttgcgattccgattccatttgcagatacatcagtggtggacattttggtggaggagcgaggagaagagtaccgaaggcgaaggtgaaggtgatggtgagggtgaagaggtgaaggagatggagagttgctgtcagagagagaagcgacggccgtttgtttatttcgtagccatttgctatacaggatccttcacaatcattacaaaatctcccatttatctattagaaattatgtattagttgaacccattaaatggaaacaagtactacgaggatcccaccacacaaatggtgacccatcatttggtctctaaaatataatgattcaacacacctatcattcaaagttattgtgatgcagcatgtatgatgactgtagtgatcaaagtgttcttgagaagttcactgggtcgtccgtagtgttgttgcttttgaagtagataaatcagtgttctctctaatgcctcgatcgagtttttcctaatataaatttcgctaggcagagggaagaaaaaagagtccaaagaattttccaagcgtctcctcttttttttctcttccacacacacacaccctctcccccgcctctcccccctttccatcccatggctccctacgctaaaccagagacgtctcttaagatatgattttttgcatgttggtagtgcttcctatgtttctgttgtactcaatggtccatttcgctgttcggtcaaactggaatcaaccacaaaaaaaacaccataccttctcttacagcgagccgagggtaagtttatgttttgcacctcattgatctttcccatcccttctttgagttgacttaaccctatctttttcccaaacattccgtgctacagagcttctctcactttctcctcccaaggaaaaggaggccctcgatgctctcgccgaggtctttgtgtccaagcgatttaagtcgacccccatcaccgcccttgagcctgtcatcatccggttcgtcttccttctctttatcccttgttctcaggccttgcagaacatagcaaacaacgatatcaatttggatctaattgtcttccgatgttttctactgtatagattcctcgagctttgcgtgtcgatgaggaagggaaagatcgccaaggaaggactcgctgcttaccggtatgcctttctcgggtttttttttttttttttttt

SEQ ID NO: 3113 - DNA, 38835 bp, Xanthophyllomyces dendrorhous
  misc_feature (15854)..(15886): n is a, c, g, or t
cgtcatccagagcgggcgtcctacacgaggtgcgatcgatctgactcggtgctctcctttctgccgccgcccggcaaactcccgcactttgttcttctcccctggctaacattctggcgcacacacactctctcgcttgctcacacacacatatacacacacgcgctcatagacaccccaggctagatcggaaatcagcaagcctggtggccccactgtccttcccattccagagctctgtcccatcagccaacacttcgctcaactcaggcaggccggcttgttcaatcgcaaacgacgcagccacactgccgtacaacacggctgagagcaagaaaggtttgtttttcccactgtcagttcacatcggacgtaactttcggtcagacacatacatagacacagacacaccttcatacgggtcgttcccagtgatctttaagccagcgcagagtcctcctaggaaagcattccctccgcctggtgtagtttcttgtcaagtcagcgctgcatctatctttcatagaaagcactcccgctgccacgcacacaacagtagaaatgaacctaccagtgacatccttgatccggtcctgctcggacggtccaaacaccgccggcacccagcgagcctcacccaccgtgccatcagaccgaaccactccgaaacaggccccctctgccccactccggaccaccgccagaccgccaggtgacaagaacgatgccagctgaagggtgaccgacgtgatctgtgcaatcaaatctgttcgctccccagatggttcgactcctactaatcccagggcttccagatggtttgggctaaggtttggtccagtccagcgcaacgcgtttcttgcgtgtcagtcagcgttcttttcttcggtccacgaaacctccctcgtgcgcacacgtttgcacactcacgagatcaccttcagtcgggggcagatccgtcggacgttatctagttgttccggcacacaatcgtccttccggtgtgacagacatagaacagaaagaagatatatatatatgttttagtccctaaacacactcactcacacacacgcagagcaaatagaagaagagaggacacgctcaccggcattggttcccaaaccagattgaccgttcctctagcccatccgtcgagagagtcaatctcgtcgacaatctcgaacgctcgaaccggcgcgcacacaaagtgcacgaatgacggcggtccgttctcagcaaacggcgtccccacaaactgactcggcgagatccgaaagcgaggagtgagatatctgtttgaatgaagcgcatatcaacgtatcatcatctagagttcgacccctttgtatggatgctcagtcgacgattgcccgagatagtcagatcagagacctacttgaaactttgtagtccaaccctaccaaccgggtgtcagccaactcagatgcacaagaagcaagcgagaaggaaaaaggaagagaaaaaaagcgaaaaagagcccaccctcgtgcctcgccggtatacatattcaacgccctcgtcgtctttcgttcgccatcagttcgattccgaaagtgccacatgtctgttccgtacgcttctagctcgcgtccgattctatcaggaaagtcgtcccctttgtcgacgatcatccctaacgattggcttgaatccgtaggggagagcgtgccggagatgaaaagaaggcaggaacatatatgtagcaggtaaagataactgatcattagaaacccagctgccactctattccctcggacatgttcttactcacggaggaagaaacaatcgagaccccacgatagcataggtccctcccccaccgatctgtccttcgtccagagtgtgttcgatcagcttgccgtttgaatctctatactcgaactcgtcgatgataaacattcctgtagacgtgcggacggagatgtgccaagagccgggtgtcggtcagagtccatttatgttccatctttcgtctattttacaagaaacaagtccgagccacaagcaaggagtacatgcgaacccacccagagtgatgatccgtcctggacatggatccaaagctgccatgatgtgatgtgatgtgatgcgatctcggacgatacctgggcgagatgaacgagatgatgttcccgatctgcgggcacactacaaaactgcctaatatgttttggccgcgtctattaggaaagcgcagcaaaatctctagtagaaatttcggtcgccctcttttttttttctccttttctttttcctcctttttctcacacatccacttccgtcgagccaacaacccgatcagctgctaccctctcctcatccagtcatcatgtccgtccagaaccagggtttcttcgcttcagtcttctcttctgtctttgctacgtacgtccgcttgttgttcttggtctcttcagtcattcttcaggcattctcgattttttcgcctttttttctctcctccactcgtccatcagaagagaccctccaatcagcaatcgtcctttcgcctttcgttcatgtcccgtactcatctatccgttcttttttctcttgcctttctttctttcttgttcccatccttctttcctctctctcttctgcctttcctcaactacgcccactcaacacctttgttgtcctattcgcatctcggatacagtgctcacgccgaggaggaggacaaggccaacgatcagcaggtcgccgcttccgggcccgagtccgaggaggaggaggacaaggaggacgctcctgctgccgaggaggaggaggaggaggaggaagatgaggagcccgtcgatgttagtccgatattacccttttctttggctttcgctcttttttttctccttccgcgtccgatcgttgcacgttgagagagtctttggtttgttgactgcttgaaccatctttttttttccctcgctctcccttccctgttttatccgtgttatctctctccatctccctctcgccaaactcctcggaattgaaactcactctcggaaaatatcccgcgtgtcgataccgatccaatgatgacctttgccaaattctctccgctacctcgaacatgcgtcatctcccttcgtccatccatcgattccctcccgatcaggtcatgcccgagatccgtgcacagtgtgaggccaccccagagtgtgctcctgccaagaagcactttgagcactgcgaaaagaaggtccgaggtggtgagggttgggagcacgaggattgcgtcgaggagctctggcacgtgagtacacatccttccatacgtatcaatccgatcggtctggaaactttgacccgtcatcgagacaccgagatctgaatgttccttctctcttttcttccttccttccttccttcgcttactcttccccgtctcatcaacagttgatgcactgcgttgacgtacgtgtccattccgtttccctcctgttttcattcgtcacgttcttccagtcgactaaccacttttctgacttttcttcttcctcttccttgattccactcgactcaacacaggcatgtgccgctcccaagttatgggccaagttggtttaaagagacaggaagatcgtacaaaaagaaggttcattctcctcctacaccctccaccctccgccctcttcaataatggacgatgcggggatctcgtctccttttttcccttaatcttaaaaccaatgtttcaatcccttccctttcgtgccagtctagagagccgtgaaaagcaaagattgagaggagtctctttcttctcttcttttcttttcttattattatgattcccttttgtttctccctccccccaaaccacaaaccttttcatccttcttattaccataaccttctttctccttcttttctcctctttcaatgccatcatcattcaatcatcacataacaagtcctcacgcacacacacatccggatctcttctcatcggaaaataaggcaagcgttcaacgcacaagcgggtggtagagaccggtgcagtgcgtgcaagtcagcatgcggtgacaacctatcctcaatcaattcaaagctgtcgagactgcaatcggtcccaccgtcatcttctcccaaacctaccagatttccaacaatgtaccaagagaagaaccaagagagaaagtcaaccggaaagagcggaaagagatacaacagggacaaaaaacactaggcgagagtcgttcccagcacagcctcgatgtggcgagatgggctctacccttttcgcccttctctcgttcatccatccggtcagcatacatcgcacactcacatacacttcgtgtccgtccactgcccagctctctctctctctatacacccgatcatgtcgttagccgaggctgcccaatcaagaaaagaaagactggatgcactgagaaaaaggaaggcaggaggatcgtcgtcagccgatgggttcgttcggtttctctcctgatccctgtatctttataatgctttctcttccggcgcgttcgctctctctctctttcttcttcttcttttgaactgacgtgtcgcttccgtcttttgtacatgcgtctctgcgttgtatgcttttttgatccgactgcacgctcatcatgtgattcatgttggtgttgctcatcttgctctctctcctcgcaccctttggtcgcttggaacacgtctttttctgggttcgttcggacgtttgaccttcggatagactcgttcagatcaaacagcgaaactttgatccagagactcgatcagccaagaaggtatcactagcttttctctgagctctttccggtgttgtttgctccttcgtggaaatcaatgaccgagcatcttgcgtgtgtatcatcgctaaccttatgtatcttctactcttctcttcgctcttctactcttcttctccccccctggtttcgtcattcttcggtttccaatcgacctgcctaatggaacgttagttctctacagccgacttaccagagaccatcgagtctgccatctcgggtgtcgcagagcagatcgtagctgaggatgagctccgtcgacaggaagaactcgttcgtcttcattctttctttctttctcccttttttttccttctttcttctccgttcgcctttctgcctaccggagatctctgtattcgtttggtcagggaactaagagaaaagaagagggaagagagcatccagccgagtctgaccgagtgtatttcccctcctcttctttcatccctcacgcacatacctcgatcgtcgttctcagaacctactgaacattgctcccaagcgacccaactgggatcttaaacgagacctcgacaggataaacttgaagctgaagccagcgacggatgaagccatcaagtccatcattcgtacgttggtcataacctttctttgttaactccctttttcattatttttttcgggggacatctcctgatcatcaaggattcgtcttcgttattgctgttgctgttactgatatcaaatctcctctctccctgtgaactcatcttcgaaccggatcggatccataggtgaacgcctcggcggctcatccaaagatacatccaagcccatcgaccttgtcagcgccttggatgcgttaggcgacatggatgatgaggacgagatcgatggtgccaagtcggatgacgagtagggtagatagaccggtctgaatgaggagaagcaggaaacggaagccgaagaacaaccgaagaaaataaaagacgattcctcgtccctcagaatgggtcaaggaaacgcgtcgtcatacatacacacacatatacatatacacacttatacatccatctatccatccttcttcacacccacacacactcacctatacacatatacttgacttgtgtctatcttcttgcatgtacttttatgatcctcgtgtgtgcgcgtgtgtctgggcgcgtgcgtccgtgcgtgtgtgcgtaatggactgacaaaccgactggctcggtgtgatcggtcgagcaaagggaacgaaaacgaagacaagaacgaaagacattggaaaaaacaacacaatgaatagataacactcgagatcagatcggatcaaaggaatctccgtccctttgaacactcgtatcgccttcttcctttccatggcctcttcctcccgtctgcctcaagctttcccagcttgcacacgttcctccagagcatccaagagtgcctgtgcggtagatgcgtccttcactcgaaggaggtactgcataggtttcgtcttgtcgaacccttgaagcatgatcgattttccttgctggattcgaggggtcaaatcggcgtggcacgcaaagttctatatggacatcaaagatcgagatcggaagaagagtcaggcctggtcgatatgcaacagagaaaagacaagaaaggaacagaacgagagagactcacgatcaacacattaccggtcccttctgttcttccgaggacccgccccttgtccccactttcccctccttttttgactctgatcaacccgactccgaccttgacccatttgccatcatcaaacttgttgatcgaagatttgccttcccacgtcgtctcttcgtcttcctcacccacacctttctccatcaacgtagggtccgaagggatcgtaggagccggtggttcttcatcccctcctgttgcttctcctcctccgccgccgccgctaggaagggcgggagcggaactggaatcggcagcagcggacgtcgcggaaccgcctacactcagaggtgaagggaacacaggtcccgaaccagtcgttaaagctggagccggggcggaagacgagccgaaggagaacgatgagctcggcgttcgagctttcccacccggcgaggcggctccgaacgaaaagttgggtgtcccgctaggtaaccgctggaaagatggcgggtagggcacagcacctgtggtggtggcggcggcggcggctgctgctgtcgttgttgaaggggattctgtcctcgagggtgctccaaaactgaacggagagcttgatggtgtcgtggcagaggtaaaggagaacaaccctccttttggcgcgtccttcttttccgtttccttctttgctgcttcctctttcgaagctctctccgaatcctcggcggccaaaacagatttcacgatcgacccagccccagaggatgatgtcgagaccttcttcgctgaagactctgaaccagcggacaagttaacggccggcgctgatccaaacgaaaacccaccggtagtagttcccgctccagttccggtgttcaaaggtttccccccaaacgtaaagccagaaggtttcgtcgcgccagcaggcgtgctcgaagcggccgtcgaggcacctccgaaactaaatccgcccgtagaaggagatgagctcgaaccgaaagaagaagtcgggaacccagatggggatgccgaggatgaagaactggatgatgccccgttggtcgaagagactttggcacccccaaaggagaacccacccgagctggcgaatgtgggcggaacaaccggtgccgacagtgtggccttcgcctcctctcttggcgcctcagtcttttgggttgaagccgagctgatcgatgcggcttgtgccgctgcatcagtctggtcaatctccgacctgttcacggcgtatgatccagccagatcggacaacgtcttggaaagatctctgaacggatccttttcaaccagtgactgcaacaagacgagaagagaatggttcagtcctcgctggctcaagtaatggtcgaccagtttcttgtccacaccgttctcagttgaaacagggtcagacgtagtgtccttggttgtcgcggttgaaaaagaaagagaagaagaaggagccggagattgggaaggagcagccgttaagcctggagccgaggggaacgggtaggcgaccgtcgacgacaacgaagacggcttggaaccatcaggactggtcgacccggcggtgagagggacaacctttgagggtctaggtctagggcttgtaggagcttcgacgatggtcgattccgtgggcgaggcaggacggagtcggtcgatcgctgatggcttgtcaattggtaacttgggcagcgtgccggacgtggtcggtccccagggcagagagattgtcggcgcaggggcaatcgccggggaggaaggagcggaggattgcacggcggttccggtgaatggttgattggacgctgagctgaaggagaacgcgggtggtttagagataggcgtggttgttgaagcggcgccgaaagtggaaggagttgtcgacgaggatgatccaaaaggattggacagaggctttgcaggcgcagggtttaatccaaaaggattcgtcggaggagtcgacgtagagggtgagaggttgaaggaaaatgaggagcccgcaggcttagatttgggaagcgaaatagaggcgaacgggttggatggaattttcactgttgacgctggtgctgctgccgaaggggtagtagacccggccgatgcagcaaaaggattcgcgacagaagacggtccgaaggaaaacccagcagacggcttggatgcggttgagcttgagccaaaaacgggcgcagctggagcagaagtcgaggccgacgaaccgaaggagaacccccctccgaaggcctgttaatgtacgtgagtgcgtgcaggtggtgggtcagtcaagagtctgtagatacaactaagaaaatacgcctcagaagatacgagccgacagaacttaccggcgtggaggatagtgtaccggaggctggaggtgtaggaacaggcgagttactggcagatcctagtctggaagaaggtagtggtcggattctgagaggatggtggaacaggattgggcaagaaaagcaaacgaaaggaaccgaacggtatgaatacatcacaaagagcatcacaaagaacggcagatcccaatgacgagaccagatcgaaaggcgagactcacttccggacaaaaggctctggagcttgttttggtgttccatcctcggtagcttttgactcgttctcatcctcctcatcgagacctccgccttctcttgtaatctgacatgaagaacgagtggatgaatatttcttcagcacacttcaactacacacacaccagtttgactggcttacctgtgaagtagctcctcgcttggccatggctctacaacggtcgcttgctcgtggagatgatggtgatggtgagggtgagggtgcgagaaagaaagcgtagagaaagttgaaggtgggatcgtcctgatatttgaataatctgatttttatttgatttatattacttaagtcaaatcacgtgaccccggggttgttaacccctcaccctccgatcgtccgtccgcctgccttctcttgttttcatccggccactctcataacatagagcacacagagctgccatcccccattctatctgtatcctaaagatgtacatcctatccgtccttctgtcttgcttgctcattccggcgtcggtcatcggcaagggagtactcatcagtcattttaacatcaacactccttcttcaagttctccttgggttcttggagctaccaacgcacttacctgggagttttcaaagagtttgttcttttctagttttcatcctttttctttttcttttttcttttcttttctttcttccaactcttttctcacgttgtgctgatggtctatctcgttcgcctttttcaaaactcttcaactcgtcaactttccactttcagcctccgttctccagttcgatgtcgaactcgtccgtttgtctgggaatggcatcttgtttgtggccaagaatggtacgtgtgttgcttgtcttgctcttcgtctttctttcttgttctctttacttatcacatgttctttatcttggctcttggtgataaagtgccgataaacgcaaagaaagcagttatcgatgtgcagggtattcccccgggtgatgactactatgccattttcttggactcttacgatggctccgtaggtcttgatcctcatccctaactcttcttcactggtatttgttctaacttctttccttcgccttgcggttgtctcatcagatgtactcgcgatcttccaagttttctatcctcgcgagtgagctctcctcttcgccttgttttcctctagccagttgatctgatcgcatatatgcttgcttaccacttttcctttttgcaccctgttccagacaacaccgcatcgactacagttcacgacgcaaccatcaccatgaccatcaccggatcgccaaagtaagcgccgcctttctcttgttcatcgtgccttgatctctcgtctcttcatggctgatccctctgtcctttccctttcttggttctctcagccccatccgattgttcgagacgaccttccctgcccttcagaccttgacgtcctcgggtaccgaccttgctggtcaagttggggcgtatgttgtcccgggtagccggcataccgcgacgaccacctcgtccgagaccagctatacacatactcctactccgaccccgaccccaacctctacctcatcctcccaagactcttccgaagtgacctcacgtggagtgaacaacggaaagagagctgagctgtcgtactcggtcgtgtcgagcgcagagaagacctttggaaacaacgcggtcatctctgttctgggagttcttgttggaggagccgttggattctggaatctgaactgattcccgagatatagaaaacaaaaggacaacgggttcgttgttggaccgatggatgaggtctaaatcgtttctgttgtcgtcgttcttcaagtcgtcctcttttttccgaggaaaagcggaggccgcaaagagatagaagaattagagatatatccttttgattcattcctgaagtgaatatatgtttcttcgttcccttgtttctatattttcgagttgtgtcggccaaagaacacttttatcgtcatcttttttgttttctctctgtctctgttctccttcaaatcgattttctcttccttagctacgattgctctgtagacaaaatcaagggatcacccccttttacttgccttgctcgactcgtcgactctactttcttttcccatccagatctccctcgattgccatcttctttattcttgctttttactcatccaaatgaacaatctcttactctagctcctataacaatatgtccggcttcttatcaccacccttatcgatcaggatggcatgtctcccctccactcccaccacgttgataacacacccgtcatcaaaagaataggtctatagcgcacttgaactcccatcgaaagtaaagcaaatagacgacgaggatctaaagagaaattttgaacgaatacaaattatgcgtgtagcctttggggcttacatcattccaaagagttccggttacatcaacgtcctttagccgagatcccaagtttatccaactgacttggccagaagaacagctatatatcttgctgttgttctcatctctttccttttctttctccctctgtctctcttttttttttgtcagatattcaaccacgctttgcccactcacaatgtcctatcctactgcgcttccagatgtgtcgacaaaatatctctttgacgtcaaggacaaggtcatcctcgtcaccggagggtcgtcaggcttgggaacgatgatggctgcctctttcgtccagaacggagcgaaaggttggtctgtcttcttctttctgtgtctctggtatacttgtacgatggcaaagggctgatcgtgatcaacactaatgtctgaatgaccacaacttcgaaatcgcccgaaacaagtctacatcgcctctcgaaagttaacccaacttcaggaagtcacagcccagctgaacgggatcggcaaaagctcaaactctggcggctcatgtgcctactttgttgctgacttgggaacaaaggcaggatgtgactctttagttagccagctgaaagaaaaagaatcttccctagacgtcttggtcaacaacagtggaatgtcttgggttagtctctttcgcgtttgtcccgaatcatcttttggaagtgttttcaaaccgctaagatcgaccgtctctcttcgtcgtctgtagggaggaccgctaagtgatgagttccccgaagtaggatgggacagagtgatgagcaccaatgtcaagaggtacgtcggctttatcttaaccttagcatttctatggagaagctgaccatttccttctcggtttaccgttgtgatcgatcgctcatgtagtatcttctaccttgttgctgggtaagattccttgatcccgataactgtacctcatagtcacactaccaagtacctccgagcttatcgagtttcatcatggttcatctatgaaaattgaaactagtcttcgacccctcctcaggaagaacgctacagctctcagtacgtcatcgcccattagtcttgacactcttctctgcctgcttttctgatcatttgctctcttactgtcctatttcaactattctaaatcccagaccctggaaaggtcatcaatgtgtcttctatcgcagggatcgtcccatctgccgaaggaggcctcagcaagcctggatggggtgtctacagctgttcgtcaacttggttctttcaccggtcacaccctaacctgatctcttttcattgcacttcaatcttactcttacaacctaccaacagatgcaacctcaaaagcggccgtcaaccatctcacaggtgtcctagcaacttctttagcagccgaacacataaacgtgaatgccatcgcccctggaacgttcccttcgaagatgacatctttcgggttcaagaacgcggagaaagaattgctggctgaacaacctactggcagggtcggtatggccgaaggttagttccttttccttactctctttctttctttcttgtttgtttgtttgtttgtttttccttcgtgatgcgtggaaaaaaagaactgaccaccagaaaaccctcacttgcctccctctacctctgtacactgggcgaggaatcgcagacatggccggtctagcgatgtttctagcttctcgagcatcatcccacgtcacaggggcaatcattcccgtcgatggaggtgctagattgggcgcggagagtgtgaaaacctctcgagagaaagcaaagctttaaagttagcttgtttgtcggttgccttctgccttctgccttctgccttcttgatcttttcccttctcccgtctctcttgcgatgtaatgtatcatgatcgatgtattagttgatcgtccaactgcttcttgtcactcctccctcttcaccaaaactgatacaagttccattgaattgcgcaaaatccgtcattgacgaagtaccaaaaggaaaagattttgaaagagtccttcacggaccactctgggaaaaggaggaaaccgatccaagacctaaacgaaacacggaaacaactctctacatggctaagatcatacactacagaaaagatttgaaaaatcaagaggaggatgaatattcaaaaacaaaaaatacaactcaagatcgttcttctggtctgaaggattcatatcaaaggggcagacatagccctggtgtttctcgaacacgatacctccgatgttctccttgatgttaggtcttccgatctgaactccatccttgatagggccagtccatcgctcatcttacagatcgaacgatcttgtcgattgtgatgagcgtctccgagcttgacaaaacgttgaggagaacctctcaggatctcgtacggtggcgtaggaaacggttgataccgaggaggaggaaatggataggacgaggtctgtttgacggtcgtgtgcgggagagcgttgagcgagatcctaaatatcaatccgaacaggatttgattactttttgatccatcgtgaaaagacggtagtagatagtcttacaacttctggggatctcttgcttcgatacgtcgtcgacaaggccatgtccatcggaagatcttactgagaatccaaacgatggcgtgataggagagtgtctacaggacacaaagatagagtgtatcagtgatgtgatcgtcgtacttacgacgcatcgaaacagatcagataaagaaatatgtcgaacccaaactttcttgaaagtattgaagataaggggagtagaagaagcgaaaggaagtgccaggattgataacagccaagaatccttctggatactcatttggtgccctggagtaggaacaggaaatcagattcttaggcgctgactatccatgcggggtaaggagagccaacctaccgaaacataaccggtatcccttcattatcagatccatcacaagtctgcttccaaagatcatcccccacgcgccgttcgactgagtggacagtagctgatttgtggaattgatcaaagcagcttgtctctcgagctcgctcgtcaagttttcaatcaagcttgaagtttgggccagatcaaacaggacagaagacgagatcgtctaaggtgttgaagaaactcatgctggtaagggatgcacgctttgaagcaggcctcaatagggaacagactgcaaactcacctgggtctgtaaagcaatgttcagagagatttccagaccggtgtagacagactgtaaattcgattgaactctttccatgccctatgaaaaaatcccgttatacatcagtaactatgactcatgagggatggacggaaggaagagtatacccaccgaatgtgttcgctctactgttccctccaaatttaccagctttgtagcgagttgctcggagctgactgctaagctgtcggtcaatcgctgaagcacaacttcgtgttgctcagcagtacgctctaatgaggaatacaccgtctgcacgaccctagagacgacctcctcatgctgtatgagaagtatgaagataatgttagggcacgacttatatcccaaactggcgatattatggagtttactgaccgattcaaaattcttatcaaacgtttctcgagtcttctgtaacataacatccgatactccctccatctctgcttccatttgggttttgattgaccggacgagagaatcgatagactcctgagacgtccgggctaattcactgggagaaaagaaattggccatagatagatgaatatcagataacgcttgtcgagatgtctcgaaatcctgacaaatccatcaaagagaggaccacatcagcttgtcatttgataagtttgataaaggaaacagcggaaaatgataaaaacatccgaccgaccttcagtccatccttccactgtcggacgttcgaatcaaactcgttcatccggatgtccctttccctggcttcttgctggaggactctcaacaaagccgccttctctagtgtgatgttttgataaaccgatcgtgcaatatctattgactcaacagacgaatggataggagatggttgtttagatcgataattgcaggtgttatagaagaacgaaattgatgagagacaaagggtggagggggagggcaaggaagaaatgcgctaccagtccttacctacggaatttatcctttgcaaggcgaaacagagctgggctgaggatcaagccgagaaaaaattcagatgcagagcgcagatgcgagactaattgaacaaactgttcttactagcttctctcagataaccactgtaagatgtccacatctgagcgcttcgagctagagctcttatgtactcgaaacgaaaaaaaaaaaaaaaannnnnnnnnnnnnnnnnnnnnnnnnnnnnnnnncgcttgatgtcaggctaagactgtctcatatgagcgcaccatactcgaaagagatgaatagagagattgactgactcgatacatcgggcttgtgaaatattcatttcatccttattttgtctggcgcactctcggtcttccttcacgcaaccatccgccgaggatttgaacggcgtacattccatagggggcgacaaccgggcagagtttagatcacataatgtcaaagagattgccacttgaaggagaaacagacaaaacggtaattctcctcatcagcaatgttgtaaacatgaagtgtttgatgatacaaacggtgtacctcgtgctctggcatcgccatcgatctgacttccactggatgttgcacaatctgctctgaagtcggcggccaccgctctgaaacaatctggtttgttttccgaaggttctaataaatctgagatttttaaatggaaacaaaaaaaagattaatcaactgggaattggggaccacccacgcaaggggggaaggtagcaacgggctgcttacgtagagaggagaacaacgcagtgttgtctttttctgacagaacggtctgtgcatagtcttttttcagaaggtcttgcagagaggaaagatgaccaatctgtcggtctatgatgttgtgggaatcaaaggagaatgagttgacaagattctgtacgtcaggtcttggagaatcagatgggtgtatgcgaacctcgactatatctgtcgatggttgaggcaacaggcaccacgacagccgatggattgttccaactccatactgcttttgtcacatttggacagacagccataatccagatgagcgaaaggctaaggcaccaagaagggtgagagaacattttggaagatttatgctggtgatgatgatggagaatcgaagatgagatgaatgctgtcgaccaaattgtaggaacggatctgtggttgtattcgtcctgaaatcggctgacagctttgtaccctgccctggaacgtcaatcgatgttgaaattcccccctttcatttccctcttccaattccgattgattttacagcttgattccttttgctcatctcaaccgggtctatacatcttttcataacaagccgatttgtgtcagtgaaagaagatattaaagctacatggattgatctagttccagtaccggatacaacatattacatttcctctactgtatttccttctttcatctcgccggagctttcacagaagattcaggcggcgggaccttttgggagacgtgtagtgaagaaatagacgaatcgggtgatggggcttgggtaaaatggtgaggggggacgacagattgtgcagatccagcacagtcggaggttactgaataggacgtgatgagtgaggtgtaataagattggagaagactgccatcgcactgatgaacgtattgtgatgagaaggcaacatatatgagtaccaagtaagagaaaggtcgtaggacttaaggtactcacagtcaagctccagtcaagacccgagatgagttctctctcgagcagattgagttctccgatcttgataccaccgactttggcataatgagcgttggtgcaaaacgagtcgcagagggctttggacgcgatgcatgcagaggctattaagaaccgatgaacggtaagcgaggaaagagtgaaagaagggaggtggactgaaaatgcgtctagatatggaagcaagatgagaagcggtgatttctggaaaaagacacggagaagttagaaggttagatgtcgttcaaaatgaaacgagttctcaaaggaagcgatggacaaacttctatatttgtgtactttactatccggcgcaagtactcgatgactgagattgagggaggagatcgagaatgaaatcgggtgaggtgttctctgtgggttatggcaattttagaaaggaacggagttaaagtaggggcgtctataaacagatgacacatggcccaggaacagaacgggacctacgataaaagtggaacctggtcgttgtgctggatgagtttagaaagcatggatgctgtgagatcggcgaaggtttgggaaaggggtgtgagtatcggtataagatatgaatattatgaagaacagaatggaaaagaagaagagaaaagattgtggctaatgcctagagcgtgtgaataacgaagcccatatgaacggactgataaacttacaaaccaagataaccagatcgtccatgtccgcgtccatatagtgatgaggaagttgtctagatgattgatcgactgattcctcaggaccaggttggtcggtaggggccgagctggtagacggctcggccggaggggaaacccgtatggtggctgtagagctggatggccggctttcccctgtctgccaagtcatgggctttggatttgttctctgctttttacattcggtttcttccagcttttctgcagccagaccaaaagaaccaacgagttggccgttcctttcgctctgtcttcttttcgagggagtcagcggagttttgggaacgggcaaagacgaaggatgatttgaccccaaaggatagggcgagaagagggctggattgatgagagttgttgacgacatgacgcgggaagcatgagacttgacaggttccggacaggaatcgttcgattgagaagaaatgtcgagaagagatagagagggtggatgcgaataggatgaacgtcggacaaacgataattttgggttaatgaacgaccgaagattttttctgttcttgatttccttgtacttttttgtttcccttattccatcgtagttcaacgggataaagcagaggagacaacgagggtgagggataagaaaagaaggagagctagtaactacaaattaggctttgatacgacgagagaatttaactgcgggatccacccatcgccggtatttttgggcgattctccggctaggtgcgcaaatcgacgaatattttccggcaccctatcggctaactcgtcaccgtatggcccgcggccgttcgcatgcggcatactaggagggcttgcgtcaaatagcgtgcgagacgaagcggaaaaggttgtgggcatcatctttgtcgtcatcaccaagagcgccagcattcgtataagagttagtgttggtagtctaatcgggagttagtaccacgattcattttattgttgatcgtagttgtatcctggtcagacgtatacaacgtggtacgcatatagaaacgcatacacatacacatacacatacacgcacacacatactttccctcacacacaaacgtatacatcaaagggcgtttcattttcgttgagcacaaaggccacatcaaaagagccaagaaagcgggcagagtgaacgggtactgaagttttgaaaaggaatagatggaaatatggaaatatggaaataaaacggaaataaaatcattgcagtgcaaaaagaacgacaaaggtgattcatgatggagtatacactgtgaatggccattaggtactcctacagtggcaacaacgtttgttactaagtctcgcttggcactagaatgtcctctttcttggaaagatgagggcatcaggaaggaaaggaagaagagaaggatctcgttaccatggataccatgcatggttagtaacgagcaaaaaacctcacccaagagctcgatttcccgtccgcagcagccgttcacagcccagctcgcacagaccctcccccggcggcccccccaggctttgtgggtgtggacgctctttggagggaaaaaaacgccagcttcgactcaccccttgtatccgactccagtctagccaacatgccgtaagtttggtatccttgttcgccaaagatggctcatctggtcatcaagatggcaacatatcatgcctatttgaatgaacgagtgaactaatcagctggattgtcatcgctattctttttctttcgtcggtgctcgcagtcccaagttcgacccctctgaagtcaaggttagttccaggcaggaccgcaagggaaaggatgtggtattgaagggatgctcaagagagagagtactggatcgagagcgtccacgaggaggttggaacaaagaagggggaacatgctagagtccggcaggggaaatgacaaacccagagagagcatgtatgctgatcagttttgtctcttccttcttctcgaatctcaaatccgcacggtcgattctttgctccaaaaaaattgattccctcgccctgccgctgtggatacgcccaatccgttctttactttcctgctcgcatcttcttcgtgtgcttccgatcggccaatcaatccttctccgtcaatttttgtccttgccacttcgttctgaaatatctcgtcccgacccatatgctccttcaaatcgacatcttctcaaccgaactcttgacttgttccataaacttctttccgatcatcatcgattcggaatcctatagatcatctacctccgagccgtcggtggtgaggtcggagcctcttccgctcttgcccccaagatcggtcctcttggtcttgtaagttcaaatatctttttgactattttagaatactcagcaggtcagatcaggccaagttggaggacaaattgtgggaatagagtggcaggtcccaaagaaacgcgaagacgaggaacaaggcgactgtaaggagaggagtggcaatgacgaagaggatggaggctgtcatccgaaacttctcaccgttaaaagcctgtcagctaaacatccgccgccatttgtattttgtattgttggttaaattataacctttagtcccccaagaaggttggagaagatatcgccaaggctactggtgattggaagggcctcaaggtgactgtccagctcaccatccagaaccgacaggccgtcgcctccgtcgtcccttctgcttcttccctcgtcatcaaggcccttaagggtatgttcttactctctccccagagtcatctcgatattggtacaaaaactcacttcacgcctttcacgcccttattccagagcccccccgtgaccgaaagaaggagaagaacgtcaagcactctggaaacattgctcttgacgagatcattgacattgcccgaatcatgaaggccaagtcccttgccacctccctcgccaactgcgccaaggagatcctcggaactgcccagtctgtcggttgcaccgtcgacggcgtcaacccccacgacatcatcgagggtattgacgatggttccgtcgaggttcctgaggagtaatggtttcattttgttgttataacatgtttctagacgacaaatgtttttctcttctgttcccaacattgatctcgaatacatcaaaatggtcgtacctttttcccagttctaacaaagcaaaccccgaaaagagataaagatgaaggcaatcatgtcaggaagagtgggaactgagtccttgagggtcctaatcgcagacgttcgcttagaaggatcgtcgatagacactttccaacaatcccctttcaagctgaaccctaatcgggcacactgtttctttcttttcttgtttcctctgcttgttttaatcaagactacaaaagaataagccatgcatcttctttgcaagtcttacactatttctcttcttcttttttaaatatctacttggactgtaagagcaaacaagctatgcttcctagctgccgtctgacgtcctggtagtcgacgtcgtgcgctagtaaagataagatcccagcaagatgagacagaatcaaaaatcaaaggagtagatggaatgataagatggatcagaaattggcaattcttcgtaaagcgaaacaaggcgaagagaaagaatggagggaataatgaaaaaggacttactatcctcgacttcaccccatacttcgatctgactatcaacttcgacctggctggcgagtgaggcttgctcaatcgtcagtctaccttcgaccagggcgagggcgatgaagaaggatttagtggtgtacaccgctcgctcgaacgctgattcgtgccaaacaatataagtattcagaaagtttcgtttcgaaggaatgaaatcttgaagaaaaaaaggaaaccagagatgaacagaatttggggacaacggacctgctagtttccaagagggaaattccatgactgcttctcggagaacttcaaccgtcttaggtggctgacgagacatcagcaccgatccgaaaacgtttactatgtagaaaagaccacacagagagaaatgtgagagacatatcattgagcaaaggcccgattctatacggttaaaatgaggcgaatgatccataccttcgactttaaaagcctccctaacccaatcgagaatcggcacccaccgctcattctgcaatcggacaagctgcgtcggatgggtctcgtggaaacagattgtgtcggtgtccaagtatcggagaagcgttgcagtgacgtccgttctagacttgatgttctcttcgggggtcgactttgtagaggcgaaagcatcgatcgctctcgaagcgagcgaggtctggaattaagtcagaatcgatgatggaaaagtggtcaacgaaatcaagctaacggttgttatactcattgcatgtaccctgacaaagtctcatgctacctttatcaaaagttaaagatagatcatatggaaggagacgatgagacataccatcggcaaagcatgattcttgagcaccttctcctgattctcccactcattcgcgatcaagaaagcaagcgctttacgctctgcaggaatcatgagtgggtttccacccggcgtccggagaggtctagtgtctagtaggattctaatgcctaagagataattgtgaaacacacatagagatgagcattgacaagtttggagaggaaagtctttgacgatcgcaggcgtaccgttgggcgtcgtatcgagctgaacagtcttccagaaccgaccaaacgtcttctcggcctctttcatgatgattgtaatagatctggttagctcttcgattggttgttccgaggttttgaacgcaagaagagctgaatcttacgtttcgtaggattcaaaccggattgagtggcattttgtccatcgattttcaattgaggcaacacgtaggccgaagcaggcgatgcaacagccttccggacaggaagagacctagaaacatacctctgctgtttagagattgctctggagacaccagaaaacatgttggggagtctgatggacatcttgactggatatgtgctagatggttgaaagctgatgaacgacggtatgtatgctggctgattttggatgaaatgactgcgcgaggggaaaaagtcccattttgaaaggttcgttcttttgccttcctttctctttctggctattgagtatacctcatcagacaaacttcatcatggcatccttcacaaacgagcaaaagtacgagctcattaccagaaaccttcaggaggtcattggtggcgataaaatcaaggatatcattgccaagggagagactgtcaaggcctattggggtacgtccgaggtcacttctaccgagtctcaaacagttttgtacaagcagacttgattgaatgacccactaatgtgtactggaaatcttaatatgtttgctactcccttaataactggcaggaactgctcctactggacgacgtgagtgtgcccattagatactctaatttatttgtattttagcaaatagagatttatcgcttctcgagctgacccttcgttctctgtgctctacagcccatatcgcttactttgtcccccttgccaagatcgccgactttcttttggctggtgtgaacgtacgtcccgagtttgcttcttacttagtgtatctgattgtcatgatgccgcgctgaaactgttttcttgatcgtcctctaggtcaagatcttgcttgccggtgagtcaagcgagttttagcaatagctagaaacagccaaactagacattcacactttgatccctcgatcagatatccacgccttcctcgattcccagaaggcccctcttgatcttgtcggccatcgagtggactactaccgacgccttctatatgccgtcttcaacgccattggtgtcccgacagacaagcttgagtttgttgtcggatcgtgagtccagtttctctgcgtcgcctgcgttctgttgccatatgaagtgctcatcatctttacaaactatcagatcctaccagctcaagtctgattacaccatggacgtttaccgattgtcttccatggctaccgaccacgacgccaagcgagccggtgccgaagtcgtaaagcagtctgccaccgcgcccttgagttcgctcctctaccccggtcttcaggccttggacgagcagtacttagacgtcgatttccaatttggtacggttgagctactctttctatctctcgagggatatcaactgactgaatctcttccctttcttgctcggaacgttaggtggtgccgatcaggtaagaggcatacaatcatcatttgtacctcaaagatactcggttcggttctgacatttgatgtctcgcgtctgtattaacctacgtagcgaaaaatcttcatctacgccgaagagttcctacccaagctcggctatgcgaaacgatcgcacttgatgaacccgatcgtgcctggactcgtaaagggcggcaagatgtcttcgtccgatccaaagtccaagatcgactttctggactcggcggccgatgttaagaagaagatcaacaacgcgttctgcgaggaaggtaacattgaggagaacggtttgctcgccttcttcaaggcggtcgccatcccgatctctcagctaaagtccagagtatccgatggaaagtctaatccgttcgtcggagagggcgccccggagggaacggtgatctcgatcttcagagacgagaagttcggaggtgacttgcactacagctcattcaaggagatggaaactagtttcgccgagaagaagctgcaccctaaggatctcaagaagggaatggtgcgttgttcttgttctctctgtttctcatagagtcgtgcgatgccgggtgactgaatagatgaacaaccactttgtcacaacacgaaactttcttttctatatcagaccgacaccgtcaacaacctcctccagcctatccgagacgcgttcgagtcggacgaagacttcaaaaagtcagaagctaacgcttaccctgtacaggctcccccggagaagaagacaaaggtacggatttgcatacgaagtcgctttcattcgatcattctctcgttgcttttccttgacaatcttccttctcttgttcgtttgttttccatccgctgataacgcagattaagaacagaggaaccggtgcgcccggagggcagaaggccaaggcaccggaaagtgcgcccgagcctgctgctgctgccgatactactactgaggccgctgcacctgccgtcgcttcggtggattcgttggctgctggaacaggtgctttagagatcacccctcagactcagctctagatacaagaaaggaaagaatctgtaaaaacgttttttgtgtctctttgtttcttcgtctttttcatagatctcgaattaaatggaagagtcttggttatcaaattcagccattagtcattgcgtttagaagaaaaagaaaaaaaaccctgatatccaaattaagtttgatggaagatgcctttccgcttcccacatatatatatatatgacaccccctttcacttcttccaacgatcaggtacaggtccaacctctccatcctgtccgacgacacccatcggttcgagttccttcacaagtgcttggttctctgcgttatcaagtaagagtcctcggagcgtgaacaatgcgtgttctctgagatctgttattaaaaggtgagagaaaacaacattcagttcaaagggttcatagccagaaggaaaggagcaggtagatccgagaggagaaaggagggggaattacaaggattcgtctcgtccaaagcacataatcccaagatgacctccagtccgcccagagttctgatccgatcttgaccttctttgttattatacgaaagcaaattgagaattctgacaaggcactttcggagggatgcgaaatgctggcgggtgtcttgttttaatccttcttcatcttcggttgaaccgtctagaggagtgatgctagcgctgggaacatcagcgctggattgagtacggataagacgcggctcgagtttgtcggatagtccgagcatcactagatttgaatatgggaaatcgcgcgatgaagcaaccacaatccgtgaatcagtacgaagttgaaaaggagacggggggaagaggaacgagaaaagtgatgaacgtgtgatcagacttctcttcgattgatgagggaagaaatagaacgaaaagaatagaggaataggcttacctatactcttctcatcgaattctgcaactctcaactcgttcacaaacttgacgagctcttctcttctttcaacctccccttcggtctcgtcatcggcattgttcgtcggctgagattttgccccaagctgattgataatctcgagacatagtatcagaccttcgtaagactttccgaacctcacgtccgaaaacctcttttccttcttttcgttcttctcaggccgatcggtttcagccgagacagcagaatccatcaattctctcacgaggttaatcaaggtagtggttgttgggatcaaaaactgtagactggcaggaacgtatgtgcgatatgatgagcgggaggattgaatataagcgtccaagagtttgaggatcgttaattgagctgccgagatgggttcttcttttgatggactgtgaaattgagacatgggtaaaagtagtagtcaggtcgtatcgacagaaaggataaaaacaggaatgagaagaatgagagctaaaagagaggaacacactgttgaagagcgatgtagagtgtggaaagatgccctgcttggataatttgacagattatctcgtacctggagggaaggaagagaggtgtatcgagacagaggagagatagatttgtgatagtcagattgagcgcaagaagaaggaatgaaagaaagaggatgtgtgtgtgtgtgtatatgtaagcttgcgacgaacccattattgaaggcgaggccatcgacatcagattcgaaccagtcctctatccgccgtaagagccgttctatgattgatagcccacaagaatggtcgtttcgagtgatgagcagttttcttgaagttcgaattgaacaagggcatagttggaagatgagctctactgaaaaaaatttgaagaggcacataagaggagaaagaaagaagacctacgtcccagcaggatagacgtctgttgcattggtgaggaccatcgtcaatgcgaatcctaagcggtcatcatctgacgccaacaaccgactatgaatagagtccatcagtcttgttttccatgaagtcaaaagagcgatcaaaagaaggaccaggagtctttacattaatacgttcccgtcaaaaggtggtttcaccaattgaggaaagattgcgctcgacacgacagcattgcccgcgatcatgtttgccaacaactgaacgagcgcgcgcgtcgtcggaaggcctttttgtcaagcacaaagacagacgagccatctgagtttaactatagggagagatagacatggatatctgagaagatagagacagacaattttcattagaaagaacttcatatgagctcatcgaaaacaggaggttgtgtaatgcgttcgatatcgatctaccgataggcgaagaaatgaaggatgtaagatatcctgccggttagggttgcaggctagaagaagaaaaagggcaaaaatccaaagagaagagaggccgaacgaacaacatctttgtttgactatcctcgtttcctgccacaaggtttctagaaaatgcagcgagcgcgcctaggaagtctgtctcttctgagccaggtgcaaagctagattgagagctgatggcgtgccatgcttggaggatccattcccagagaggtaaagtgttgccaagtgtttcaaaaggcgaccgggaactgttggcgaagatttgtctgtgggtgaaggcacgatgtagacaggcagggactctgtaagctttcgaatttgggtcttgggttgtagcgtgcttgggtcatcgaagagaaggaaagaaggagagaaagtaagatgttcgaaccggtgatcagctgatttcagcttctcagcttcttctctcagagcaggagtgaatcgaatgagatctttagtttccaatgtcattcaaccaagtagtatttttgagaaagataactaagcgtcgaaagaatgaagaggataagtaggaagaagagaacggatcggttgggagtgtgtcggaaagaagcagaaggtgacgcgtcgaagacgaaaattcttattcttttctcgtcttccctcggctttcaccgaagaagaaagagccaatccatcctaccaacaaccatcccattccgatctctccgactgaaacacagagacattcactaaatgtctaatatactctccgtccttggtataccaatgtcaggctccagctcgaacatcagctctgtgccgatgtcgaacccgggttccgcaccgaatgcaccagagctagaagactgtgcggcctgtcgaataattggcggaacgacgttcatcggcataggatcctatgcggcctatcagtcactctctcttgcgcgtgctgagcgtcgggcggccgaggcattgtctgtgaagaacggacttaacagtccgccggtgaggaaaggcctaatcgcgatgggtgtcctgggtattggtaagtttctcacgttcttctcgacttgttcatgtacgggtgtgcatgaatccatgcgaatgtacatatgagtggcagaggaaaggaaggcagaaaaaaagaagaggagagaagagatattaattgattttctgtatgttctctgtattttcccctgactctcccccacttcttcagtcttctttgcggccggtgtgggcagactatctggcttgcggatgacggatggcgtggacagagggttaaagtcagatgaagcaaacataaaacctaggctatagtatggatgcgtgtgcgtgtgtgtgcctgtgtctgtctgtctgtgtctgtgcgcgtttctacaaaggatattcttgttagtttgttatacacacacacactctcatatgtgcacgtgtcatataatttgctgtgctatccaccctcttaccttcctctttcacgtgtcggactggacgcgagcacaaacggcgcgcgtacaagcgttggatttgtgttttgattatgctgtctactttgtagaatgtagagtatgctgagaacgagtgaacgaggatgagtggaccagtgggtgcatgtcgatagtgcatgtctatagtacatgctgagaatacatgttggatgtatatcaacattatggctgctgctgatccctctaggatgagcgctctatctctccttctctctgtaagagtcgctcgctcactatctaagggaaaatcctgatcgacccttgctcgccctagcgtgcgctcgttgtttgtttgtttttcttcaggcgtacagactcctcccttgtttcaacataggccaacaagggacaccaaccttccaggagagctggcccctcgtagaactaatccaaactaacagcccggttccttgttctcgtatctacaaaaagagaagacgctctctccattgtctttctctttcgtactctctctttctttctcacgcctgttcctttcgctctctctctctctctctcgcttccttctatccacgttccacggtctcttctattcttacacatccacactctcgctatctctcactcgctcactcacccactcacacatttcacactctctaaacccgttatcaaccctacatcatcatggctgacactactgaagtcgttcctatctccaccattgctgccgaggatgttgtcgaggatgcttccgaggaggtcgtcgctcctgcaattgtcgaggaagtgcccgtgattgaagaggtaagggcatatatctgtctacacactttcgtccgctcgtttcctgtcttgtatggccatactgttcgatcgcgttcctggctttagctcgagaactttatttgacgtcgtttctcacgccaccctgtccttttgtttccgggctcgccatccgttcgtcttgcacccttgcctttctcttcgacgaatgaacagtccgctgctgaggttgaggcccctatcgaggtaagttttcatgttcttgtgtttgttgaggcccaccggtcttgttctcctctgaatcaaactcgtagtaacattcctgcgcaaccgttcctcaatttgaagaccatcgctgcctcgcccaccgaggttgcccctgaggccgtccctgtcgccatcccggcaaaggcaaccactactgaggtccccgtatgtaggctcctctttactcttatgacataaggtcactcacccgatccaatcgatccatcctcttcataggccaccaagccagcctcacccaagaaggagggtttctttgcaaagtttatctctggactgaaggaagacaagaaagtaagcgtacaagatcacgctatctatcaaacctttttcgctgtacatgttgctgagaccttgcctgttgtcaatcctagattgccgctgagaagaaggctgcagccaaggccaacaagggcaagtggtcgaacgtcgtagttgtcttgggtcatctcccgttatggaaagctaactcgtcttatctttcatctttttagcagcagccgagaagaaggccgccgaagaggctgctatcaaaaaggctgaggagtcctctagcaagaagactgaggaggctgctgtcgtcgaggacgaagctcccgtagtcgccgctgctatcccgaagagtgatgacactcccgtcgttgcacccactgaggagactgccgaggccgacgttgtcgagcccaaggaggaagccgtcctcgtcgctgctgacgccccaacgcctgccgtttctgagctaaagactgtcgaatctccggcagacgtcgctctcggagccgaggtcgaagttcctgaggagacagcgtaagagcctcttactatcatgatcgctctcatagccgtggggtctgacatgatgaatttttgtatcgtgtcttgctcagtgaggctgtgaccatcgagaccgctgtagtcccgtaagtcaatgtgacttttttctttttcaaggccacatgtttcctcacgaactgatgatttgcccctctacatagtgaacctgcatctgtcgtcgctcctgccgccgtggaggagaaggaggctaagccccttgctcccaaggccgctcgacgacttagtgcccgtatcgttggtattttcaaggtgtgtcttgcgtatttcggtatgattgtagttcagttcaacattcggctcacctctgtcttgttttctctacacaagggttccaagtccccggtatctactcctaccgttgagaagcttccagagtcggcgcctgtggtgagtcctttgatctgttgagtctgttggagtctatgcaagccactcatcgccctctcttccaatcatttccctctctcgatcagattgacgccgttcccacttctgagcccctttcggagtctatcactcctgcagtggaggaggctgctgttgcccctgtgatcgaggccgaggctcctaaatctattgttgtcgcctagatagaagatttcgtttcttctgattttctcgtcttcccttcccatcaaaggagcttctgttcctcaatcatatactgttacattggtctttgctaatgagtgtttctttgttcgtatatctaattacaacctaatggcgagcacgtggcgcttttttctttctcttaacccctatacctcttcactctttcatcctacaagctcatcatttgaatcttcggctacctaattatatccatgggtgcttcctttcaattcagttcggatgaatgctggcaaagtaagcgtgtagacgaacacatggattttggacggccattatacatgtctttgtacaggcgtatagatttgatggaggcccatgcgcagcaaccgtccggatgaggggcgatggcgtcgttgaaagaggacagagaaaaaactcctcaccaccaaaggaccagtcatcaacatcacatcacatcacccatcatgttccagtctgctcttcgaaagaacgttgtcgctcctctggctagagggttttctaccgctaccaacggaggaaagaacagtgcgtatcagtttctttctgtgatgagatagatatcgtcggatggagctggacctatcagcccagatcggggtcacccatcaatttttcgatccctcttctccttttctctttatttttgtttggaaaacggagaagactgaaggaatttgaccgtgtcttctcctgcttgggcgtatccgtttcgttgttctgacttggtctgatgggttgctatcgattggattttaattgaatctgttcgtagacactccgctaagtgagttttccttttttttccttttcttttttccatccatgattctctccgtgaagacgaagtcttataatgaggtttcttccgtttgatttactgtttccttaacttgatgatctgtccgagtagtcatcgctggtgcactagccgtcgctgccggaagctattttatctacaactctgaggctggagtgtacgccgagtcaaaggacgagtcggacgcaaagccccgacctgtcgcattcaccaagtaggttttgctcttgtccttatcattttcgaacgaaagagaagaacaccttgttgatcgactgacttttcttcggataaaacgtttttcttggtcatctgcaggtcagagttcaccaacttgacgctctctaaggttgagacttacaaccacaacacgaaccagtacactttcaagttcgatgatccgaatgctatctgcggcggaccaatcacccatcttctgatggtcaaggctgccgaaaacggattgattgtcgacgaaaaaggaaatgatgtcgcccgaccgtacactccaatctctcgacctgatctggccggggaagtcgtgttgcttgtcaagaagtacgacaccggaaagatctcacctcatcttgcttccctcaagcctggagacaaggctggcttcaaggtatgttctttttgccgatcttcgttgagcaaaattcgaccgtaagaaaagcctgacggttctggctgggatttggggttttgcgtgtgtagggtacattccctaagttcaagtacgtgcccggagcactcgaccacggaatctgcgtggccggtggatcgggtattactcctcactaccaactgattgaccatgccctctccgtatgttctaagatcaccttgaagaagaagctacccatttgtgtagacgcgcatgttttaattgatatttctcctctggactacacaacactcagctgaaggacgacaaaacaaagtggacgttgttctactctaatgtgactgaggatgacatcttgcttcgaaaggaatgggacgcgctcgccaaggcccaccctgatagactcaaggtggtctacgtgctggataagcctcctgcgggatggaccggtacgttcatattcacataccttcatcggctcatttagatttcgatggataaatgactgaacgatctttataaatctacggatcaggcccgaccgggtacatctctcagcagctccttaaggacaacagtcctgccggatccgaggccggtgaggccgtcaaggtgtttgtctgtggcgtacgttgtttctctgttccctttgcctgttacatctcttcattcgttctctctctctaggtgactcggcagagcattaactatcatcttgggttgtctttgcgcgatgtgattggaacagcctcctggtcaggttgccgccatcgctggacccaaggacggtacgtaagatgttgtaaatgtctgtaaagaaactcctgggccagatagcttatgatactgtactctctcctacgtcaaaatcataggtatgaagcagggccctgttggaggtgttctcaaggagctcggcttctccgagggccaggtgttcaagttctagatttgccgctagatgttgaagatgcgtattcggatagagtatcccttgattctttgggaccatcacctctctcgtttgtttctttgcaaaccactgtatcatttgattttatgaaagatcggatatagaaatagagaacatatgagcatacgcggaggtcagacagccggcaatgaaaggagacggagagaagagaaaagaaaagaataatgaagaaggcagccgcggcaaatcgtccaatcccgcacataaaaactttttttttaatatttttttaatagaaaatcaccatcgccatcactatttctcttggtaactctcttggtaacacatctggtctatctcttgacttgatcagacaaggagaaaaaggacacagggttgcgctagactggtcgttcaatcggaaacggaagagacattctattcagatatctttccttcgctttaacccgagtgttaataaccaccggtaaaccacggggatttgataaatcattcccaattttttttaaataacatcttacatttatacttttctccccttccacatctccctttccctcctcggccttcctaccatctctaatcgagaactgtcgaggggttgactagtattcctcggtgagtcttgaatctctcttgacaccctctcgatctgcagagcgtagggccatgccttcggtctgggatgtccggaacgccatgcacacgagggaacatgatcggatgactatcaaaggcgtcagaagtttctccatcttttcattcaaagagaagaaggagagaccggactggaagatacacagatctcttgtcttttctgttcttgctactctcaatcctacctcctgttgtctttctcatcttgcccttgactaatcaagaggaacgacgtggagctgaaccttcttttttgccaccctttgtttttccattcaaacaaaaaaagaagaaagaaaagaaacaacactcgcccttagtcaacttttttttgcgcatcgactctcaactctcgcatacatccatacggtctagctcaaaggccaaatacacatactcacatacacagaatgagcttgacctcttcgcttgctgctcaggatgttgatcggaatgcagcaggttagtcctcttccttcttcttccttgcgttggctgtgctagcctaggtcgaaatgttcagaggcaccaagcaggtgacctatgagctaccgatcaaccaaagcgacgaacaaacttcaaccctcaggaagactatacctcgttttggcctcagttgttgttctcttccgaaaagaaactgtctgacatatggatctgtctgttggtttcgctttttgttgtccctttgatccctgctaccaccagatcaactcctcgacttgtcgtcctcatacaaccaatccgtcataaacactgcttcctctgacctcaccgtcacttcctcctcaacagggtcgaccagaccacagacgatcgtcaccagatcattttctacaaagccagtggcgattccaacaccctcgtccggttaccttcctcgaaagtccaggagaggaagcgaggcaggcaccggtggagagttcacagccggaagcttacctgctagcgtaggatccgcccacggctctggatccagtctgatgctttccggcatggaaaagaagaaggcaggcggaggatccgggacctcgccttatgggatgatgagaagagaaagctcgagaacttctcgaaaagggtgaggtcgttctgtggtttctttctcttgtcctggtcgatgggtagagcaagtctgactgatgtgtatctctcccgtctcctgacaatgcttctgtcttgcacatgctccctagatcggttcctccgactttgtttgacttccgacagacagactcgggatcgtcccctgtgggttcacctaggcaactacccatccagacggaaccccgcccaattcctgtcaagtcgaaccagactccttcgcccttaccgttcgtgccccagtcgttgcccgcctcgagtgaggtcatcctccaacccggagacgcagaggacggagagattctcgatccagagatcatcggaaagttaggaaaaagacgaaagagcgagaacgtgtttcggtgcgaaagttgtaacaaggtgggtctcttttaccaatgccttcaaacacatttcgaaccattgttgattggccttggtccaccttctttagatctaccgacacccttcttgcttggtgaaacatcgatggcagcactcgcctcactggaacgagtcctccaagttgcttcttagcaaacaccagcaggtccaggtccttgaggttggtggctttgccccattctgctttctttctctcatcttttctgcagaagaagactaatctcgcgtctctacgtttccaatctaggcggcgacaatattggtgcatcttcacccaaacagtgggacgtccttaccggaagacaaggtgcgttcatatcggaatgtctcgacgtccctcttcctgaaaccaagcgctgatgtgtcgtctttgtttgtccctcgtagtcactctggccggcggccgtctcaccgacatcccacccgatgccatcgatttccttcttggattcccgtcaagtatctcgcgcaaattccgccgccgcccgaggaatttcaccagccgacatttccacaggagagacatccagaagcagcgaggatcacacatcgtcctcatctcctgcgtcctcgacagaagacaccgacccggaccacgaccatgactctggttacggaggtagtgtggtgagaccacctttggcggacgtcaagcgatcatcccctcactcgtcttctccagggggtttggcaccggcccttcgagtcgcgtcggacccgatcccgatgaacagacggacctcattcggtaccgctacacttgccatgggaaacctagccttaggagcgtctccccgaggcggtggaagcggcagtctcggtggaggctcggaacacggaagcttccagccaagcagtttccaaccatccaggggtttccagtcgcctcttcattcgtacgtctcatcttcgccttccctcatgggtggttaccctctgaatggtcatcacgcccatggatcgaacggcactggttccacggtcccttatggatcaccgtacggaacatcacccgccttgcctcttccttcgtcctcactgaggaggggaagcagctttgtggatgacggggacgacgatgagaacgaggacgaaggggatgaggacgcggatgaggaagagtacgacgaggaagacgacgggagcgatccgagaaggaggttgagatacctccgttcgtcaagagttccggacgaggttgtcttggaggaagaggaggacgcagagatggacgctgagggacagagtcaaccgaaagaggtccatggcgcgtgggatatggaggacatggatttatgacacgagcgggagcggtcatctctgttcttctacttttcccttccctctagatgtcatacacgttaatttcatctttcgatctagccctgtctattcttttcttttttcttcgctcctttggtctcttctagttttccggccactagttattttctttccttacttcattatcacaacatatatccattcaacccacatccgagtttactttctcttctttgctctttctcttgtatatatttcgttggtacatctttctctcatttgttgtctagtttctggttgtaaataccattcaaaccgttatctctccttctctttcggtactcccttctttaatctcttttttttttcatctgtagagagatcttcctctcgaaatttccagacagtatatcatctagtattcgatctatacatctccgacgatacacgtctttctttttctctttctctttccaatctcgtcccttttgtcatcgctatttgttctttcttttctgtttcactctcgacatcgtcttgatccttcatcctttcgtttgggttgtttctccgggggaggaggttttttttccctctatcctttttttttcctttcaattttttctcccctgaaggatatgtagcgacggcgtgtggtttgagtaaggtatgatcagggatgggtggcgcaagacgagtcgagttgtatattctatgaacccgtttctttccgtccgtcaccgattcttcatcaaagtttgcctcggaccaggaccaggaccagaaccagaagacaaaagcgaaggcgaaggctgtgagaggacaagatgggcatgctatgactctaatctaggatgacccaacccggattggagctgtgttcaggtctgggttgagtcgggttggaaagtatgaaggaaggatctataaaacaaagagacgagacgaggagagagagggagagagagagagaaaaaaagggggaataagaattgaaaaagaaaagaaagaaaagaatgagggagatgggtagctttccttggatacacacaccggatgaggtgttcatgacgaagaacaaagaccaaaagaacgaaaatagggaacatgatggggatggaagaggaaggggacgtgagacgatgattgcgttgcgcttggaagtgcgggtgatgggatgtatgagtgcggtgtc

SEQ ID NO: 3114 - DNA, 17059 bp, Xanthophyllomyces dendrorhous
aaaaaaaaagaagaaaaaagggacgaacgcaatgatcttgtcacctgcgtcgacgaggttaatgttatcgccctcaagtctcaataaatcagcagcttgttcatgagccgtctgtttcttttctttggtagaataattccctttgaatttcccttgggcgatgacaagagcttccaaccggcgtttggctcctgctttctggaggatctttgtctcaaccgtatgagctgttaccagacgaaagaccaggacaggccgggtctgtcctatccgatgggctcggtccatagcttggagatcagattgagggttccagtcctggtcgtagaagatgacggtatcggctgctaccaagttgataccctgtacacgacacgaaagtttccgatgaaagcctcagaaacaatccacaagcttgagagagagaacagaagaagaaaaaagcaaaaagagacaaaccaaaccacctgctctagtagagagtaggaacagtcgacaaactccatcttcttcgccccctttattaaattcctccatctgttcccgtcgacggacttgaggcgtacttccatcgatccggcatacctttagtttcttgtattcgatagcccagtcttcaatgatatctagcatgctcgtgaattggctgaacagtagaacctacgcgccatgcgaatcaaaacaggagacgtttgaggaaaaaagcaagtcgacgtctagatcagatagcgaatggagataacaatacggaccttgtgtttacgctcaaataaagcatcgagaagtcggttaagaaggagcatcttgccagatgcattgatgaggtctgtattgacaatctctgatcccgttatcggatcaataggccagtcaaacaagaacggatgagaggcaacctattaaaagtcagaaaaaaagaaatgaacagcccattcggaaggatacaggcggtcggaagggaatgagccttctcacttttcggagttgcatcatggtgttttgtaaacgcatgttgtttacggattttcctgcatgacaatcaatcaatacctgtcagatcaacgaccataggccaagaagaaagaagggcgatgacgaacgggctgctttgttagagtactccttcccaatctcaaatgccgagcgggtatcttcaggcgctccttggaacagaccattgtcccgttctttctccaattgcttaaagtatttgttgtcgctttcgatctgagcatagtctttcttgggaactctgttcagtcgacgactctttctggggttggcttcatattcctgctctggttcctcttctgactctcgagtctgctgcccatcgccatcggcagcatccccgtggtcatcctcattaacatgttcgccctgggtctcccccgacttcacagcaatcaaaaactctctgatcgtcctcgcggccacactctcgtacaactccttttgcatctttgtcaacggtgcgtgaagaaggtactctttctttggaggtaacgacttctcgacgtctatcttgagtcgacgcagtaggaaaggcttgaggattgaatgaagggtggtgacaattccggtggattgatctgatgtcaacaaggacgtcttggattccgaacgggatttgatatcggtgtcgagatcgaacctgagaatatataccagtagatgtcagctggagtttggaaataagggatcgtatctgtcatccttcatcaaacttgccattgttgaaagctatctaggtcgtcgaaaatctttagggtttgataaaggaaaggagagaaaagagagccgcgacgatcagtctatcgacgaatatcatcaatatcaggttgactgttcgagaaacccaatcgacttacatccggaagaatgaaattcaacaaggaccacaattcactcagattgttctactctcgccaatgagatagatccgggcctgtaagaacgcgttctcgtttgaactcagttcaacagaggagaaggacttggactaacgtgcagaggagttccactgagaatcaacctgttggcggtgttgtacgatttgagctcccgtatcaacctatacgagagaagcaacatgtttagcaggcgtccaaaatcgggagctatgaagaggatactcacttgcagtccatgttctttaatcgatggccttcatccacgacgatatatctacaagatcatttcaagaaaatagtgaatacccaatgacacaaaaagttctcggcggtaactcagacaaaagaagaagatatcacctacttccattggaagccccgaaagaaagcactgtccttcatcgcgacttcgtaactcgtgatcaccaccgggaaggtcttcatcgtgtttggctcctccttcacgttcttacaagcctgaatctttgccctttgggatctcgatgcgttctttggcatcgtcacacccaaaccaggaattagtttaccggcgtaggcggctcctttcgcatctgagggagcagaaagccgggtcttgcgcaacacagaacgttcttcgggagtacctagtacgtttgagattaagtatggaaagtcagagaagaaagggacaaagtggaggagggaaaacacaaaccatgatactgaatagtaggaatctgagttgtcgagaaggtgccgagagaaaacaaaagatggagacaggaatctcaactacatcgctcaaaaaggataaatcacacaaagcacagtgatagaggagaaacgtacgtcgggtgtgaacttggcaaactcggccgaccaattgtgcagtacactcaatgggcacacgatcatgaacgctaccaaattagatttgaacatgagtacgtgggagagaagactgattgaatagcagtctaagaagactcacgtccccaaacacctttcgttcgcaggtgagcgatgaaagatatagtctgtaatgtttttctaagggatgtattccgtgaaatgatttatggacaaattagatggcaggatacgactcataatgatatcaacgagacacatacccaagtcccatctcatccgctagaattccattcagaccattctcataaagcgagattaaccattgaagtccctgaatttgatagtctctcatcactgctccggttacaagcgctggttgtccttctgctaattccggtgggtccgtttcgttttttagacttgcagagctaggctccattttgagctttttcgacccctgtaagaggtggatatgtacgtttaagaccggaagatgataactataccaaacagacgcttgtttacggccacagagatatgatttaagggaaggatgcactgacatttgtgtttgtaaccttctttcctcctacagcctcttctaaagcctccaactcatcccctgcggcctttcgtttgataccagcggcattgcctgccggcttctttttttcctttgctccatcttttgcggtctctttcttaagcttagagcttacagagctctctgcatttcgtcgagtcatatgttttggttcgacacgagactcggagtgagctttggaggtggccgtatttgcactagcgcggagtcgagcttcttctttcattcggtcttgacgctgtctttccattttgtcttgaaggatctgtgtatgtggcaaagtgctcagaatcgaaacaggctggatacatgagaagagagaagaactcacttgggtatagattcccgattgctagaaaagattgaagaaacaaaggcaacgcaaaatgaaagattaaatcgttgttagggtgcgcgcatctatcgatcaggattcttaccaagccaactttctttgaaaaagcaaggaacgacagaacgaaccttgagaagaaagtttagtcgtcccagcctggatgatttttgttgctacacgattaaaaggacaggtcgcagaaggaagaggaagcgacgatggaggaaaatccagacaagagcacacgaaagacgcgtgttaattatcaacacgtcattcttcaccgacgcgtcctttcgccttccttttccttttcttttctttgctgccccaaagcgaacgatactaaaggacaacgagcaaacagacgaacctcttccatttcctggtctgcatctagatcgttcgtgggtttctctacctctccgtcatcctcatactcctcgtcgtcgtcatcggtctgtttgatcttatcagccaaccgaccgggagaaaccgatagagaagaccctcggtcggctggtgtcgacggcgagttggtcgttttcgttgttgccgtagagagcgcaggagtagaagccattaaaacagactgttttactgattgacactgaaaggcaaatcaacagagagaagctagagagtgagtgttagtgagtatgaatcgatttgtttgagagtacaagtgtggtgctagggtgatcgatcgactcttcgatcatggtcacgtaaccatccgcacgcgtggttacggtcgtctggtagccgcctttttctccttcctgccttgatctctcatcatcaccaccgacctcgaccattgacttccttctctttctctctcaatctaatcagcaataatgtctggaccagcagcagccggtgggtcttgtttggattatgtgcttctgctctatcagagattctccttatcttaacaagaacttggctcgtttggttgtatctctagccggaggaacaaagttcgctcggttcatgaaccaccctgccggttcgtatctccctcttgtttcttcccttctctttcttttgggctcgctttgtttctatctctctcttgttcacctcagaaatactcacgcgctctggttctgttcgctgttggattgaatttcatagggcccaagtaagttttcatcacaccgggagaacttttttctagccgaggacatttgtcggaatctcgtccgacctagtcattgcctagcacctactctaacccatcttctctctcgtcctcttgatcatccttttcgaaccattttataacgttctgcgaatctaaaggaccatcttcttctgggctcctattgcaaagtgggctcttgtcattggaggattggctgatatgaaccgaccggccgagaaggtctccgtcaacgccaacctgggtatgtcctcatcttgcttcgtgttctcttcctcacttgatttctgagctttccagacagctgagaacggttgcttttcatgatacaattcgaatcttgaatagctcttgccgccaccggtttcatctgggttcgatactctttagtcatcaagcccgtcaactactctctcgccgccgtatgtcttgccgattgctccttatctatctgatactctggtcgccatacagcaatctgacgccaatctcgtggctcctctcattcttgttttgcaggttaacttcttcgtcggatctaccggtgtggctcagctgtaccgagtctgggagtaagctttttctattatatctccgatcaactaaagggaaaaatacaataaaaaagttactgacttgatcaagttgcaacttgctcatcttcgtctagttggaggcgtaacaaccctatcgaggccgccgctgccgacaagatcaaggaggtcaaggcctaaacgaccgaactggcctctatcctttgtcttttttgagtttctagacacaatctgtattctatcttggccttattctttcgatttgatgaaactctaaattttcttctcagaggtggatcatcgcacaagcgaaagaaccggggctggttccagtcggctcttctcatatttgatgcttattttttgcacttgtacctccgtggttcacaactagcaatcccagctttggtgaaaaaagccgctcagtcgcacaaacgcaagcgaccgtacaacccaatcttccgtgtatctcttcagcgtcctacgaaaaggttcagcatgctaacggaacttaagcgagcatctcaggattagaagacacgggttcaatggtgagcatatatacgatgatggggtttgacaaagaagaggaaatatgatatttagtgggtgatatagggtgtagtatgtagaatgcgaaaggatgatgaacggaaatgaagtcgaatacacatgagtgaatgtccagatgaggaagggaaaagacaagggtacggatatctatcaggagaagtggtgacaagccgatgcaagaagagatcgttgccaaggaatctaagaaaaatccccttcgcgtcaatttaaccgaggagatgtgggaattgcaggagttgaactacgagtgatgcctatcgaaggtgatttcttcctgccgatgcgagtccccatctggaccaacgtttccagagaagcttgacagtttatccgtactgtgattcgtattgggtagctttggttagcctgcggagttcgatgtgcaactgaaaagatacaatatcgctcacaatcttcatcccactgaacagcgccatcctcaaggacgagaacaatagtagatccacctagtatatttcaagcacacacaggatctgtgttagactgaatgaacgaccagccatgtaaacgataagagatactgaccaaatgcaaagtacccaaactcctgccctcgaacgacagtgtcgccagactctacagtgtgcacgatggttcccaccactttacagaagaaaccgattccgtttctcgtcaatcatcgagaaaaactagaagagtcacagacacgtgaacaagaacatagaactgactcatagctccaacgcagatggcaaacattcgtccaaacgtaggcgagtcgatcgggacgatcgtcctgacattctccccgtacacatcaagctgggttcggatggcctgagggttgacagtatagtacgcgccttcgattttttcgatctctcccacgaccccgtccacaggaacgctagataaccaggacgataaggagaatgggttagctgggaatcggcagagtatgtgtgaattagggatgaaggaaagctcgtactggaatcggtggtaatcctgtaccaagtagaacatcattatagttagttgaattctgaacgcacagataatagaacatgagatagaaacgcacctgaggagctaatcggaagacagcaacagcgcccccgtcgtacctgtgggcctcctttccataccgatcccctaaaagtcgctcgattgtgaacctattcaatgatggcaaccatgtacaagtcaacaatcacataatcatgccaaaaataattcaagtaacaaccgacgaattactcactctcttcccttgatccagatcttcttagcatcgcttacagtgtcgaaagccataagacgacagtcggcacaagaaaccagcgtattagggtcggtcgggtcactgacagggcgcacttccggctttaattttcgataaaagaactgaaacaagcggaatgtcagtcacatccgaaactatagatatcgttctgttattctatgtagatccaacttacttcattaaacgtttctatgatggtaagagtaacaacgaacagttttacaagaatcaataagtatctactcatacagtctactgaggacttctcctgacaagactcactgaatgaatcaagaggatccagaatttctataaaaacgagatttctcaacaatttagttcataaaacgatgaccaattcagataggcgaacgcatgacgcggttcttaccatccatgttcaaccgatggaaagcaatgaacggtgcgatatcggcgactgattcaggcgagtcgtacttgatgccctgcttgaaggacatgttcttgagaagccttcgagctggacaggcagaggacgtcacaggacgtcaaaggtcaacgtagtgcgagcgagagcaggaaattggatggacacgaacctcgaccaccctccatacgcgatttggcgcccttgtacaacactcggattccaagtctgacatacacagccatcttttcttcaagtaattgacctgtctgtcggtcctggacgagaatgttggcggaatttgcgcctgccggaagagcgcgcgtaaacaagatgatagtaagtgcggattaatcagttctatgaacaaaaagttgagataacgggtatctaattaaaaacacgaaccaatttggtaagcaccgctcgacaccttggtgaacactttggtcatccacttccgttgagctgagaatgaaccaacatgcatcagtaagaaaagagtttgttgcggccccagcatgcgaaacatgattataccttgcgaagatgtaacgtagttgccaaccagaattctatttactcttgcccagtctgcactagcacagacctgaggacgtctccaatactgattagtgctcaagaaacacagataccgtttgatagcctgcaataatgatgaagagatacatactgccagatgagtaacaatatccacctcagctctcttgctcagtctctgtcggtggcagagcggacactccttgatgttaattaccctctccaaatcactgtccggccctagttcttcttcttcttcattctcccgatcgtcatcgtacgggattcctgcctcgtctgtcaacggaatctggtttgtttccgacgttacctgatccccgttctgcgcagcacttgtcagatttaccttcggtatttccgctgaaggctggccagcttctggaccagtgacagagagagagatcgcgtggtttggttggcctttcttatcaatcaaatcgagagaaggaacatcggcagtattgggagtttcatcactgaaactcggtgattcttctaggccgacgtgcttcttctcggttttggtcttcttgacctcttgctcgagggatttaataacctgttcgatggtaagctcgtctttctcgggatcgagtaagtatgacgtaaagtagctttctaaggtctcgtctgtaagagtcgatcccagagagtcgagcatctgaggtacaagaaaagacaatcagaagtttagatagccgtcgacgatcaatcttgcgcatgctcgtccacttacagcttgtaactcagtgaagctgatcttccctgagttgtcatcatcatacgatttaagatactctcgccaaaacttagataagacacaagtcagtctcccgaaagcgtcactgaaacctatgaattgcgttcaccttctgtcgcaatgcatcgtaaggctcgtacctaaataaggtcatagtcaatatatatagaaccaccaggatataacggagaaaattacttactttgctcgaacggtgatgctaggcttgtgcttggtctcccaacttggatcttgaggggtggatagttgaagctgggcatgacgagcatgggaaggacataaggatcgatataaagtgtctcgctacttaggtagcctgaaaagagggaaggaagaccaaccttgaactctctcatcgcatgttttccatctccttcatgcaatccagtattcgcatcaggttcaggggagtctgccaacaactcagacagaggaagcgtggccaccccgacaaagtcgtttcccgagatcttgtcccagtcgagaatgttgaattgaatcacgaaagaagactcaaatttctttacgtgaaatagtagtttttcgtcccaaacaggattcaatctgtagtccgatagaccagaacacaagtcattattgatctgtttcagagtcagaatcagaactcagatgtgttgttctatacgtacgagtgtcgaatcactcgagttctgaacactttcttgccgaacgacgtgacaacgaaaggctaaacgtgatcacagaccatcagcaaacaaagatgcgatgttagtcaagaaaacttgaaacacatacatccatatcaaacccagttttcaggactgataggaagaaagaggcatcagaaccacgtgcaacaactacatgagcgaccatattggagaaaatgctgctgtaccaacagttcttcagcctcggtaaatcttctgcgctcttgatttccaccatggcaactcctaggatatcgctctgagtagaataactccaattcttcttggcgctactcttcttctctctttttcttctggatgctctggacacgaaagatctccctccaggcgtcgccgcgactgatcctggtccctgaccctgtggatcgaagtatcctggctttcttccaggcaaaagcttaccatctggtgagagcgtaagtccagctatgggagtagatatacccgaaggactcaaagcgggcgaaatcgctatggctgatcccggtgtcatatcgctatcgtcctcgtcgtcgctcgagtctgaggaaacgctcagcccatcgtcttcttcgtcttcctcgcctgtgactgttccaatcccttcgaaggcggggaccgaatggagattacgttctgaagcatgtttcagaaggagtgtataaacctcttgaaagttttgcgaagagagtgactcagaggatagagtgttcggcgaggtggatgaaaggaaccctatacggaactggatggacccagtggcttgagtacggctacgagacgaggcaagagcagaggtcataggctgaccgtaggtgtaggatgaagattgagtcgggtggctatgattgaacgtgtgatatatcgaggctgtacgtacgggtaattctggatcccatgcaaccgcctttccgtctggaaaccagtgctgcacctggagagcggtttcacccaagtattcctttcgaagaatatcctgctcattgtagtaacagatatggcgttagacagagaagataggggactcagaaaggccttgatgtatgaatatacttgccttgtcccaaacgacagcttccaaagctccgagcctatctattaccgacccgtaaattggaaagtcaaacgttgactcattactaggaaacacaggatccagcgtttttttaacaactggagttgtctgtcgatttggtacaagggtcatgaccacgaatctaatcaattaaaccctcaaaaatatcgtcaacctcaggagtctagccaactcgggatgtttatgcacatacgggtcgctgctcgtccctttcttgtctttgcctagcaagtcgcatccgctgattacttgaactcgaacaacagcaattgggacctctgcaacaacatcagaaccaagacgtgggtttaaaatagcaaggttcaatgtcagcctcggcgatcttgatcgcctttctctttccttcgtcctcttcgatcaagactagtggtgaagtatgttgaataggtgaaacacaaaccatctgaacaaggctttgatttcgacctgtttgagctgacggggttcagatgtttaacgagccgaataggagccattatgtttcttcgctatcgttgagatgaggagcgcaaaagagatagatggtaataaagatcaaaattctagttgtcacagccagaggacagaggtaaaggggtatgcagtattggccgcggaggaaaagaactcacccgcccatgagtcctggagaccttttgatccaaagacatgtccagtgtcgtttagactgtttgcgattctaatcagagatagctttgtgaaggagggtggtgaatgatgagtggtgtgaagaaaagatgggatggagagagccgagtgcggaagtgatctgggggacgactccgaagatggacattgtcacccggccggtgtggcgtccggtacagcctacacatccgcttattgtaacatagccattgattatacatgccaaacctcaacatcgaaataactttcttcatcatatatctttacaatcaacatcttgactttattttccacttgatcgcctgcttgttcggcttgtccggcgccttttctcccttctcttttcccaaaaagtagttacgatccactaagaacaagccggccgtaagtgatgttgagaattggtttcagtaagccaagatggtagtgcgattaccagcgagacgatgagacagaaggagaaacgtactggctgtcgcaaagatctgcccgttcaacatctggtcatacatctccgtcactatgataaatgtatagatttaagcccttggttagaaaggtataggatgtaggcgatatcgagtattaattgaaccactcaccggtctggcattcccacctaaccttaccagatacttcatcaaccatggtaaagaacactcgctttatgcccgctctgtagcaagtatgatagtgatgagaatagccttgacgctgaacctctgcaaccaaatgtggtcaactcactctacgatccatccaaaacatcgatagcatggcctgctctctgccaaagcccccgatttcgttacacgacaaacactacaagaatgggttgagatttgatgtcaatttcgctttgtatgatacaggatagatgtgtactgtagcacatactaaatatccgctccgtacgttgatttgccgccgtccgctttggtccgacggcacgctactcgaatcaagcattgttcacaaagtaagtcgagagtatcttaagctgctttagaggggtaaaggtgagagcacgtacagaagctaggacccctgccattcttctccttcaaattcaaaaggatcttttttccaaaagcgaggttggacatcccactcttccagatcatcagcggtcccgtcgatctctcctccaccagcagacattcctccatcgggttgggcatgtcgtgatgatttgggagagtcaggtgacgttgatcgagtgagtggaggagactgtcggaaaggagcagaatgagacatcattccggatcggccgctggaggcattcccggtaggagcagttaagatacaggacatctcggcatgcatggagtctgatatagtcaattataccaagaattgttgttagacgatgtctttgacggtttagatgagaggaaaaacaaaaaagggcaagtaactgacgctgaacttctcctccgaaataagtcctccgttgattatgacccatggatatgatttttccgcccttgacaatggcggctgcatgcttgtggttgaggtcactgttttcggtttcaacacaatccgccatcaacatcagaatgagatatacacacggcttgcatcagagaagagcggtagaaggaacaggcgaacctgttttgagcctcggcgagaagaagggaatgaattcgatcggttcgagtcatgatgctaagatgttacaagattgatgtgtgatgctgaattgagatgcagataagtgtagcttggtcccgatcttgatgagaagtctcaatgggctcttgtgagtatgcaaacaaaggaggagagaagaatggacctatagagttgtcagggataggagctgggctggtaacggaatggttacgagatggctacgtgagatgtaaccgctcaaaggatctttgattttgaggaacaagttcaggctccttggacagagaaacaagattgataaagtcactagggaacaaggataatacagggacgagggaatgtgctgagaacaagcgaataagaaaagaagtagaaccaccaaaggatccaggcttgggatttctatctacaagtgtccgagaaagcctgtgttatatgtggttcttaggctctagacgcgtagtacagaatatactggagcgcaaaaacatgctggagccagaaaccaagtagaagtggaggattatgagatttcgcgtcacagcttagaatcacgtgtagttcaagccacatccctacagattgttagggtttgcatttgcttacgtcaccatacctgcacacgtcatttctattcattcgatcgatccgtctttacgggctcataaagcgtagctcgactaaacgacgagtggagttgtggcagaaagagggagtgcgtgtgtgagcgactactcctcccgtctgtttcgcttgaacgtctccatagatttgtaagcgaccgatcgagtgccactcatcctcagaggatcgatctgtagagaagaggccaagaccttgtgcacttccattctatgttctcactgactgaacgatcgttctacgatcggcaaagaattcatcatcctcttgagaggcaaaggagacatatgttatataagatgacccactaatcaagctctctgaacattgccaaatctcttgattgttcacttacccattcaacctcatctgacatatcctgctcaggatgacgttcacagcatttcagacgaccgctctaggagccgccatccgggtcctttccggtcgaagattactcaaatattctgatgagaaggaagtacccgaccattggcttcatccaaatgagaatcgacccagatttattactgcactgagacctaaggtcaccgttcatatgcccagagcgagtcaagagtctgacatgactagggttgatccagaggctgcttcccatcacaacaacaaagcaggcaagggaaaggaagagaaaggaaaggacggaaatattgtcgattttgacggaccagatgatccggagaacccattgaactggtcgacctggtacaaatgctttgtttgtttccaaatctctctgctgacgttttcagtctacatcggctcttcaatctactcgcccgctctcattggtaccaactccgtcgcgtctacattcgacgtctcacaaacctccgccctcgtcggattgactctattcgttatcgggtacgctatttcgcccatgatctggtcgcccatgagtgaaattcctagaatcgggagaaacccgatctatattggtaccctcgtcattttcgtcgccatccagtttccaactatctatgcaaagaatatccacgttcttctggccatgaggttccttgccgggttcttcggagcaccggttctagcaactggaggtgcttccgtctccgatctcttcgcgccaaagtatagagcctaccctttggctgtctggggactgggagccgtttctggaccgacattggggcctctgctcggtggatttgccttccaagcgaatggatggtcgtggacgatctggttcgttttccattctctgggatctattgatgagcgcaactgaattcaatatgcttatctctgatgatattatacacctcttctggtcccattctcagggttctcctatggctatctggcggagctttaatctttttgtcaatcttcctacccgaaacctcgcctgacaatgtatgccgccttgttccttccccagatgtataatctctacttgttcggttcctgatcatcttaccatgttggctgttgttttaatgtcagatcctgtacagaaaggctgttcgactgagacgggctaccggaaacgacgctcttcagagccagggggagatcgaccttcaaggtagttctgtcggcgccatggtcaaagacaccttggttaagccatttgtcctgggcactgagccgattgtgtttgcgctgaacttgtaagctcttagaggacctgttctgtctatccttactatgtctcgagtcatgacgcaagcgctggcgtcgacttatagtttctttcattctcatgtctacctgttacaggtacatcgctctggtctatggaatcttatacatctggtaagaatgatctctctctttataaagaaactttgcttattcaaatataacttttgctgatcgttatgttcaactcataggtttgagagtttccctctggtctttaccgagcttcatatgttcaactccggagagagtggattggcatttttgggagtgagtcgagggaaattcatgatgtaatgttgatggactggaactaacatggctctgcccctctgtctttgtgaaatcgacattggttctgatagatttttgttggagctgtcattgtatgtttctttagctcaacttctgattttaagttaaagggcatgtatctgacgttggctgtctaccattggattcttcagggattgatcggatatgtcgtatactctaagcttaagtttgagcccgagtttgaaaaaaacgggaatgggatgatcaaacccgagcttcgcattcgtgagtccttcgaggggacagatagcgaaaactagtgcataactgcttacatccatactgtacctgtgtctcgccaattgggtagccgttatgtgtgttggagggttctgtcttcctatctgtctgttcatgtttggatggacaggacattcagcatcgattcattggtatgtttaccctgtacttaattacaagctaaatttcgatgttgacagtcgatgcgcttctgttttcttaggattttgcccatcatcggtaaataatgcttgctctcattcgatatttgttctggaactgaactgatatggtttctgtcattaggttctagcttctttggtatcggatcgcttctcctcttccagtctatcttctcttacctgaccgacgcctaccccaaggacgttgcttcaatcttggccggtaatgaccttatgagaggtgtgtttctccctacatttttgatctcatattgttctcttgctgaaagcaacaatactatctccgcgctcgatcttcaggcgctttcggtgcagggttccctctcttcgccaacgccatgtttcatcatctcggcattggaggagcctcatcatgtgagtcgttgtctagatatacctgtccccttcgtgtgactctgtctgatttgactgtcttttatgaaaacattctatagtgctcggaggacttacttgttgcttcgttgcaattcctttcgtacttctcaagttgtgagtatattttaatcacatttctgatttgtgattaggtttgaccgaactttgttctattgattgcagcgggtccaaactacgacacagtagcaaacatgctctaaaggacgaggatattgaggcataaatttcactcgtctccacctacacctagaagtgctctatcatactcaaatactctaatttcctctatatctaattcggaaccacatcctgtggctgctctcttatctat

SEQ ID NO: 3115 - DNA, 42454 bp, Xanthophyllomyces dendrorhous
atttaattcattgaaacacgatgagtttcgaatgacttgtgtttggattccggtagtcttgacatcatttcggccataccttatcatttttcctccttgaggcaacaccctcaggtcttgcgcagagtcccaagcacttctctccgaggagttatgaaacgtgacaactcttctctatcctccttgtttctcgatcatgttactgagacccctgagcggtgtgtatatgggtttgggaaaccagtggggacttggttgaaagcaagtgccacagcgaaagtccacttttcacccgtatccgaaaaaatactgagtttacctgcatgtggctcgatcagacatgtcatctgtctttttgtctctttatctgttcatgtctgcggactgtagagcctttatcaggtcgttcatcatggccgacggccagtcgggtcgatctaaggcggggggaggaggggtttcttgcaaacaaacaggtgtcggtctcgacagcttataagacacaaagaagtcggagtgatgaggacaatcgtccgcgttgaacactcatcggtggtgttggtgtttacctctgctgcctctgctgctcttgctgacctatcgatgagggacaaactagatctatgacccatgaagtttgggtggtttgtggtctaaggctatcccagtccaaaaggaccatgaatcgacagccgttgattgaggttacccgcaccaagcccaaggcttatacttatagatagatagataagaatatcgatgcttacttaaccaatgaagcttgacgcgtttgcgacgtgttcattctggtcgcgtatcaaacgcgtcatctaatcctgcttctcttccttctaccaatcaccctgttcttcatagttttcatgaactttccacatccagttctctcggatgagcatcttccttttcccctagtcccgctcatcccgtcgtcatccggttccggttctctgatcgccttcaacggtcaacatccgacttcaccggaatctacatcaaccaaccttactagccggtcgctcaaacccgaagcagaagactttgacaagatgctagatatgttggggattgcagatgatacagcagatcggaaaaggtttactcaaaagaaggaggatgtatcagggagtccctcaaaggatgcgacggcaggaaaagttaatggaaacgtagtcaaggaagacaacactagagagggaaggaatagcggagtttcacttagcttggaagtacgtccgttgacaacgaatcatcatagaacatctcgctatcacagtcaatagtagctgaacatgtcttctctcgtcattctaacctcagttagaggatcatttttctcagatgtgtcctcctgccgaggactccaaagtgcagactcgattcgtccgtcatccgtccgtctcatccacatcctcctctcaatacctgaccacttcgtccgaacctgtgcgattaacctcctacaactctacctatccttcttacccagtctcttttggctcttcagccggtccaacatcatatcatcgaccacactcggtagcgagcgatgtaccctcactcgacgaaaacattttttcaagatcatattctagtccgaggtcaataacctctcgaagagagaggcatcagtcaacgtctagtaaattgccctcttatagacctcccaaatcaagctcaactcaaatggctctcgtgttgcaaccagaaatgagggaatcagacgaagctcggccttctttgcctacgtatctacaatccccgatgcaggaagtattcttcaagaacaaagtccccgctagcggcaatccttccgagccgatcgtcaactcaaatcctctcgcgcctcctgatctaccttctttggagcccacgcttccttccactcaactttcctctacttcgtcctcgtcttcgtcttcgccatctctatcttcatacattgaaccacaccaaccgactcgctcaactcacttctcgactttccaagctcatactgaatcttctcaaacgactcataactctgcatattcacctcccaccttgtcttcctcccgccataataatccttcttccaatcgtctgttcaagcccagatcgatctcgagtatgacactagagggcgaccgtccgtcgggtcgacacgctgctcgaagtggatctactccaaggagcgcgaaggaaatgccacagcaaacctaccaatcatctataagagggccatcacctaagcggagaacttcagtaagatcgctcagatatgaggaacgagaagatgaatacgaggaggaagacaatgaggacgaagatgagcaagccgagagcacagaagagcatcaagagtttttagtgagcatctcctagtcctgatacttattttggattcagaccgacaaagcttacgcgtttattcgactttgcttttttctcctgactcgaatgccacgtccaacagaatcggcctttaggattgctggcactatctcatgcgcttgcagcagcgaacgaagaagtatgttttccgtcttatcttcgcctttgccttctctttatcagtttcagatgtattttgtcaatcaggatttacagtgaagtggttaattttatacgtgtaggtcggcactcttcgttcggtcgttagagacgtcaatgctttagttaccgagcaagctgccgtccttctgaccagtcgctatctacctaatcaccctcaccttcttcattcgaatcccgtggcttctccttctccctcttctggagatgcacatctggttagagagacggggcatagacttagtgcgggtatatcaaaggtcgggaggagagcgagaagggacgaggactggctaagcttatcgaaggaggaaatcgatgagtttagtggtgcggatgctagaagggttctgaaggttcgattcttctgcgttgtccttgctcaacctcttggtctcttctcttccttgtcatctagagagcggtcgactgttgacactcccgtctttgaaatcatttctttactcgttttacaggcaatcacatccccgcaacttgggctagcatcaaccatcgccttcctacgacacatcgagctccgattgaatcctcttcttgaaggcgcgccttctagatcggatgacgacgtgttctcgaatgagagctttcagcgaatgaataatgtgctggacagattgttgttgggtcagcggcaggaaaggagttagacgcgaaggttcgagaagattggtgaacagaacggttgattcatatgtttcgtggccttttttggataaacttctttttgtttttggtatatagtctctgtcggtgtgtcttcttgtatattgcctctgcttcggtttttccgatcatgtactatcgtagttgtatgtgtacgccctgcctttgtattttactttattacacctacttctaatcaatcggtttgtcgattctgagacgaatctaatggattggcgttgatgttttccccaggaaatgagacctaggtagggatggtgggtagaacgaatcaacttattccactcttgacccactcgtcgtctccgaacagtccatcctggttgtcttcctgctctcctaactttactctcctcttcccactttcactcctattccctgccgtcgcccctgcttcatccgattcactctctggacgagatcgttttttacattctgacatgatcgattcatcttcgggtgccatcaatccgaacacgcccgattgggagatcacaaaatctctctctgcgcgtctagctctgggtgagaacacaacggtcgcccttctgatcaatacgcctttttcttcgtacatgataggtccagactcggcctgggtggattctgcctctggagagacatattgatcgatcgaccggatttcttcgggaagcgaactggacgcgcaccgtcggttcgttcgggacagcatgatacgcgtgttgatagaattcgtccagactaaacctagtgaagcctctttcgctaggtgagggctcgatccgttcgaccattttgtttgagacttgtatcccagttgaaacactttgttggtgggcgtgagtgatttcagatttaataaagtttcttcgtcttggtatttagatggtgattcagaaggttggtcgaacgcgtaataagagttggattcgttcgaccggacgtcggtcgtccaacctgttgatgaaggtcttggtccttctgagctaccaaacccccatagtgtcacgaaatcaaacacgtctgagacttgattgacaacaacgacagctagattgtgctgaacggcgagcgatcgaagtttgtctgcagtggtgcttagagaggcagatcgctcggagagactcgagaccgagttggtgaaggacgaccgggtcaacgccgccagagaatctaacacgatgagcttgagagggagtggagaaggtttaacggtgaaccgaggcaacggacgaacggactgggagggtggctgcttagaatcgaatggagtggaggaaagacgcgacgctaaattagggacgagataggaaagtgtgtggtccagtgcttcaatgtcgttgcattgaataaaatggatgttgtcaaatatcgagtcaagagatattccttgagattggaccagttcaggattccgggcaaggatgccttctgccagggagtagagacggcttgtcgggagggatccttcggatgagaggtacgcgactgacccacttgcctgtgggcatttggacgaaagagtcgggaacgaaaactggacagagatcgccaatgatagacaaagctgagtctttccagtcgagctaaaaaagtgcaagccaagatcagttctcacctccggagcaacgttgtgcctgagggagaatgagaaacggtcgagactcacctttgcccagcaatctcggtgatttctccaactctcaccccgccacctaacaactcatccaatgaattgtctccgaattggacaccctgccaccctgttcgagcaccatgcacttttccttctcgagcttttcctagtttgaccggagagccacataccccgcgcgccacggcctggacgagctcgaccacctcatcctctgagagcggtttcaaagttttcgtaagcttctgaagagataccagtaggatctcggccggagcgagcagggacgcgcgtctgagaatagctttctgacgaggtgtcaatgtagaaagctcactaagagccagatcgaacataagccaggaagaaagaagaggtgtcgtgtcgtgttgtgttgatgctggatggatcggacgactactggttggctcccgggagctacggcgttgaccggggcatacagtaattaaccctaacagaactggctggatgagtttttcctacattcaacttagaaagaatcgttaacgactaccatcatccatcccttcatccttctttctcttctcttcgtcctcgccgttgtccctgttcgttttgatactgagtgagaatgagatacgctattcttgtcacaggtccggtagtctttcttctctttgatgtatctgtctgttgcttttggaatgttccatggcctcattcattcttccttccgttctgttaggcccggctggatccggtaaatcaacgttttgcaactcgatcatagcacacgctcaatcacaaggaagaaacatccatctgttcaacctggaccctgcagcagacaaattcgagtacccgcccacagtggatatcaaggatctcatcagtttagaagatgtaatggaggaaatggagtttggacctaatggaggactcgtctactgctttgagtgagttcaatcgccctgtctctctagattcggtcataaatctgtatgttatagctaaactagagagagtaaaccaacagatatctgctggataacttggactggttggaagagcagctgggctcatatgaggacgactacctgatcatcgactgtcctggtacgaggtcttctctcatcagtctagagcaccgcagccctccttcgaagtctacttactggtcgaacattgcctctgatttgattcaggccagatcgaattatacacacatatccctcttctcccccgactcgcatcgttcttacaaacgaggtgcgacttccgagtctgcgcggcttacctacttgaatctcaattcatggaggacaaagcgaaattcttcgcgggtgtgatgagtgcgatgagttgcatggtcagcttggagtgcagtcatctgaatgtgttgagcaagatggacctcgtcaggggaaagaaggccaagagtgaggttggaaggtcagtctctctttctttggttcccttttgctagtctttcgtctatcttgaaccgaaaagactgacgatacagaatctgatattgtgttgggtcgttagatatcttgacccggatccacttttactccaggatgagatcaaccagactacaaaccccaaatttcattcgctgaatgaggccatcgttcaattggtaagcacatccattgtgtattctctttctttccttcctaccaccctttcctttcctccttccattcatctgctattgtgtctcatcatcacgcggattcatcgcgctctatcttcatacagatcgaggatcacaatcttgtatctttccttccgttggatccttcgtccgaatcctccgtcaacacgattctcagccatctagataatgctatgcaatacggttcgttcgatgttcttctctttcatgatctgctccatttcatcagggcgctatcctccgtctgagagaaggttgattctgatcgttttgtttgactgatttctcttgggattcgtctgactcaaggtgaggacgaagaaccaaagatgccaaaggatatggacgaaggggatttcgtagaagaagatgaatgaatgaatgaatgaatgaatgaatggttctactgtaatcactggaagcaaacggaaacatcaacacaggttatcaatctctcgagactcaagttacctccttttccctcttcttgatacagacctgtctataggaaagaattgagtaggttcctcgcctcgtcagcttacacacccatccaatacctctctcagctctctgactcttgcaggcatgaccttccacctctcccaccgccccattcccattccctccttcctcgctttcatacacatcggtccatccacccagctagaacacgatgcatggatttctggaaacattccttcacggagaagttggcagaactctggatgggcaagaattgaagcagccgatatcccagatccagggaggatggtcagaggacgccgaggacaagaagatgctgagtgttttgataaggagacagattgatcgataatgctcttgatataggaaagggatgaaggaaacgtcggttgtaaaccgctgaagagggacagagaaaagacatgagagcgagtttccttacttcaagacaatagcctctctcgggagaaggaaaggctaaatgaggacgaacctggtgagaacacgagtgattttcgggattgtgtctaatacgcagagagctatagacaaaaaaacatcacgtcagctatcttgtgcttgaaaaacagcatgagagaagagaagaatataagacggaccggacgtcgcccagaggagaggaccatcagccgaagggtagttgatcatgtcaaatgcccggtgaaatgtcactgagaccaccagagaagacaaccgaccagtcaactcagctgttaatggaagattggttgggagtttggaatgaaacccataccttctaaaggtccggcacatgctgccaatctatcaagcaactcgacgaaacaagtgagtaacaaactttaagaatcaagcctcattaaaaaaagacaccaactctgaagtcaccagctcatcaatcatgccatctggctttaagcaaccgaacacgactcccatgacgcgtagtcgtcgaaacgtcgcgatctctgccttcatcagacggacttctgactcggaatacacaaagtcacctggtcgaggacggatcatgatcattaacgggagcttaggaagctcggactggatcatctggtcgtcgtacaacaggcatcaagagaaaagaagagaactgtgagtacatcatatgaagtacaaagacgatgaaggagattagacgcgtacattgaccagcgcgacggaaggcgttgtacctcctccttgacaaagagaaccacatatctccaaccgatctgctccattgtcgacagctctaccagcatacatgaatggtcgtgtatatgtatcagatgtaggtatcgtccgatcaagattaccaaatatcagtcaaatctattcggcgcttcaacttaagcaacgggcacaaggcgtacgtcttggccgagtcgaacgagtctacgcagacctcgagcaagatcttcttatgcgtcataaggatgagatatcagattgtgtcagctatcaagtagaatacggatgatgccgggtcaatagaagatcagtgaatggtgttccaagatgtcatctggatggaagctggaggaaagatgcaaagcaggaaaacccgatttaatttcgtccatccgttccatctcctatcatccatcatctctcatcccgttgcttcatcccgttgccccttcccgactcccttctacgactctctttatgcctctccaaacgactactcaccatgcccacgctcgtccaggatctgctagacgttcctcttcccatgggcgaccatcctctacgtcttcctacaagagaggcaacatagggtctaatctaggcatgaccagctcgagcggagctcctcaggacgtgaagaccaaacgaaacgatgtttgttctaatattcatccttctttttcttctctttccctttctctatgaccaatgaaaaagttttgtagatggagctgtttgagaaggacgattggttgggctgataatacctctaccctcatattctggcgtttctgttaatttaatcgatgggcgatttgttcaacccatctccatctctaccaacctttcaatttttctaaacttctacttgaccctccttgcatgaatacgttctttctctcttctccgcctcttatgcttgtctttgtgttttcatgatcatctcttacagggaatgccgacctctcacaggatctcatctcatcgatcggacggtcatctgcctcgattaggcgccctgcaacgaactcacagcaaaacaactattattgatgacgagaggccaaacgctgcctcggaaaacttagtagatgctggcggaagaggttatcaggaccaaggaaaagaaaacgtgagttgaccgtgtgatctctgtttaaaagagttgggtacgtgctgatggacctggatgtttaacactctttcctcaatccagtcaaaggatggatcagtagctggggaagaggagggttgggtgtccaatagtgacaatgaacgtgcaactgcgtccgaagaggatgaccctagctccagaccatcccgccatcgaccaagtaatgtctttcgaaaaaatagctcagcctcgacgatccgtagacgttcatcaacttctattcatcaaaccgctgtgtcgtcgtcatccactaacttgcaagatttgaattcgaaggatcagctttcgtcccagccgtcccaggattctcaacatgttcaacatcctccgaatgcccagccgtcgagggacctatctccgagaaagaaacccaacatgttcagaatccattcaagttcttccgatgttactcaaaatgctaaaccctcggcaccgtcatcatccattgcacaggttggatttactaccaagccatctgaagcggaagatcttcctcctcaacagtccttacccaaacaccaaaacggattcagtccatctcctcgtagcagacaatctgcgctccctcctctaacctcagccgcgactgaacctaccctccgccacgctcaacatcctcatgctaggccttctgccaatgcacgcgtccatttattcccttctccgcgtcgaagcccagccactccattgccctctccaccgcttaccgcggattcctttcattctggaacaagcccagaacgtgactcaggtccgacatcgacaacgacccaaaccgttcatcatcaggcgaatctgtcagaccaaacgaacggggcgatcgcatcttcgcctctagtctcgaatctaagagaagattctcatcctagatctcggcttggtctaaaaaaggataaagagattgaacaacctagtccagctcagaacgacgagtcacagctgttcgtctttaatccggttcaagccactccatcggcggattcacattctcgtcagcagtcgcaaggccctcctcacggtcggtcatcatcccatcccttgcgaacgagctcatctcgaagttcaattcgctcgctcgtcaaccgtcctcaactgttacccaaacgactcgtctctctctcatccaacattccagcaattgcgccccctcaattgacgaatgactctgccttggcagattcgcctgccaactgggagacatcctccccggctggctcatacatcagtgggcagcatcaccccgacgctatgggttcccttcgaaggacgagtgtatcgagtgtaaggacggctaccggaagtccatcccgattctttgctccccccggagatccgaaccaacccacctggggctccacagattcgacgacgagaaaccgggaccgaacggccagctcggccagtatacgcagcaacagccacagcatctatgggcctgggggagccgggtcggccggtggagagttttccaatggagcgtccaaggcgagaggagcgatggcagcacttcgatcgagcacgcatcttggaacagaaacaggctccgcttcgtcatcaggaggaggtattggccggcggatggtctcgtcaagctcgactcaaagtctggctgaggtcgcctcgggggtgaggaagagtctgatcgacgggttgagttcattgacgtcgaacggatccgacaggacaccatcccctccttcctcatcaaccattagtcctaatggcggcggtggactgaatccatcttcagtctcctcagcaggtcgagcacaaagtcgatcagccactgcaccgacctattctagatcaaacacctctttcctcccctcttcttccagtggaaactcaaattcacaattctccttgtcatgtctgaccgctcttcgaccggtcgtcagagaacagacaatgtttcaagatagaccaacctcaccccctcctggtgccccaggaggcccccacctgcatccgtctccattcatcgaggcacataagagtctctggctaggatttaaagaagacggaaggttgagtccgatgggtctgagtgggaagagggtattagatcaaaaacggctggctcttagttaagagtagtgcacaggtgttgctcaatagcgccttcctctcttcttttctttcttttccttgctttcgtttcgttccgcacaacagtcggcatgttggaaattcactttattccgttcatcttgtcctccttttttattttatctcctcatgttcttccattctctgggcatcatcgatcaacaggggccccttccttttgtatcattctcatcccttacaacccactcatatttcaaccatcactcacaaacaactggccatcccctctcctttttttcttccttttcttgtacccatttttaattgttcttccatagggatagaagaacggattccgttttagaaatgatagacactacggaagtggaaaaaatagggaatgtgaggtaagttggataccggacaccacaagaaaccctgaggttgatcagacgaagcgcacgataagcacacacacacacacacacataggatgagcaaggagccattgaagaaaaagcgcatgtgatatcaaagagagcaagaaggggaataagaagagaggagggaaggatatatggatcttttcacccgtttcctcctctgcggatgatgaaagattcaaaataccaaagagagaaccacacacggacacatatgttccagcaagaaaagaagaaagtaaaataaaaaaaaaagagagaggagagaaagagcccagaagaagaaaggacgttcaaaaagattctagagcctttggggttttcttgatctaacagatgcctgaaatatcgtcttttggaagatggaatcttggatctcttctcttctttctttagagctcctcctcgataggaacctcgtcatcgtagagctcaccatcctcgtcctcgagcggggcctcttggtactgagtgtactcggcaacgagatcgttcaagttggactctgcctcggtgaactccatctcgtccattccctccccagtgtaccagtgcaagaaagcctttcttctgaacatagcagagaactgatccccgattcgcttgaatagctcctggatacaggtcgagtttccgatgaaggttgctgacatcttgaatcctcgaggtgggatgtcacagtgggcggtttgaacgttgttaggaatccactcgacgaagtatgccgagttcttggtctgcacgttctgcatctgctcctcaacctccttcatcgagacctttcctcggaagtaagcggcgttcgtcaagtactttccgtgtcgagggtcacaggcggccatcatgttcttcgcatcgaacatctgctgggtcagctccggaacggtgatcgcccggtactgctgggttcctcgagcggtcaaaggcgcgaaaccgaccatgaagaagtgaagtcgagggaagggaaccatgttgacggccagctttcggagatcagaattgagctgaccagggaatcgcaaacaggtcgtgattccactcatcacgatcgagatcaagtggttcaagtcaccgtgcgtcggctgcgtcaacttcagcgttcggaagcagatatcgtagagcgcctcgttatcgatgcagaaggtttcatcagagttctctaccaactgatgaacagagagtgtggcgttatagggctcgatgaccgtgtcggagacctgtaattacgaaaattccatacgcgcggaagtaaagagaacggtgagacgtgcagatatatgtgtcattttgagatgaagagggacatactttgggcgagggcaagaccgagaaagtagccatgattcgatctgggtactcctctctaatcttggagatcaagagcgttcccattccagctccagttcctcctccgagcgagtgagtgatctggaaaccctggaggcagtcagttccctcagcctcctttcgaacgacgtcgagcaccgaatcgacaagctcggcaccttgtgtgagaaggaacatgtcaaggtaagtcatagtgaaacgcatctcaaggacgatgagggctggagaacactgtgaaagacctaccctcagtgtctagttgaatccacacggcgtcacgaaaagtgtgaagaagcatattcaaagccacaaacgtcagtccatatcatcgtcgtcctccgttttgaccacaaagacagataaacgaacaatgtcctttagcccagttgtttccagctccgctttgaccaaaaacgaagttatctggtcggaagaggtttccgagaggaccggctcggatagaatccatggttccaggctcgagatcgacgaggacagctcggggaacataccttccacctgattcatttcatgaacggaatgatgaaagatcatcaatgcctgtcttggatggcgcatacagtcatatttaaagactaaccggaagcttcgttgtagtagacgttaatcctctcgagctgaagatcggtatctccctcgtagctgtagaagaggcagatcattgttgggtgttcgagataagtctatctctagaggtcaagtatagaaagtaaggcagaacgaacgttccatcggctccaatgccgtgttctacaagcggaaaacccagagaagacaaagttagaaacagagatgtaaagcacaaagtggacggcttcggaggttgatctctcaaaagaacgcaccatcacaaaggacctcccagaacttagctccgattctgaagtgtgtcaggtaaagtcagtccctgccatcagttctaagaacatgaaaggttaatatacgtactggttaccacactatacgaccccatcaggacaacagaataaaacataacgaaagatggatatcagatgctgaacttgccagggctgaaacaggccacgtgggagaagaggaggcggggttgaacgtacttgaccagtttgaaggtggacaatctctcgcactgtcgagcgaagtttcagaagaggcaagagtcagcatcatattagatcagagagacaaaaacttgatgaacgatcttctcgagaaacgattatgtgtatgggtgacaggcaactccagaacggccgtccgtacaaattccacccaaggcgagacagtcttcacccagcccaccaggcgactttttacactcttggacgatgtaagtcagctcaaaggaaatccctacagagataggtttacaacccaggctgtaccttgacagcacaagatgaaaaaaagatgggaggagaaagcgagggaaacgcggaaacagatgacggctgcagccgccagagacaaggcctgcaccacccaatcgagacaagggagagaagagggaaaagaactagaccaaatggtaagatgagacactgactgatcaagtagaataaaaagaaaagaggagagagttggaaagaaagcgacgactcgttagaggattaggatgagggaaagagaaggcggagggcaacggagggatgttaggaggacgatggatggcaagagaaacaggaacaggaacaggaacaggaacaggaacaggaacaaggctcccaaaaagggacggggctcgagcgcagggagatggaaaagtgtaaccgatgtattttgtaaccactgccaaaatcggtcgcgtcgacacgacagacgcgtcaagatctcgccacgtgatccatgtgatttctacgttaaggtttcatctactcttcccgctctgttgaccgacgtcttcgccttctttctcttcttttctgttcatccatccatccatcaaccttactccagaacgcgttctttccctctctttacattcctttgatatataccccttctttttctaggaccatatctgtttctaaatggcgtctacagatagcgcctacagatcaacaggacggtctcctcgtacattggtctatgctccctctccgttgcaagttaaacggacacctctatcgcccacatccaccaacattcctttatccaatactctgtctccttcctctcctccttccattttctcaactcaaaaatccgttcgaccagtcaagtctactccgtctcttcgtccgccttcggtctctttgacaggccgagctgctttcccactctctccttcctttcctccggccgttcccgcggaccaggacgtcacagacgaaacgatcgcttcgctcgctcctcctcaggttcagttccacaaggagatctttatccatcgacacgagaggacctttccccatctccattctgctgagcctgcgcatactgcggcctacgcgtctcagtctctgctccctctatcgccgccagctgatgtcaatgtagtccctcaccctccttcggatcatatccgaacgaacgaaccactaccgacgactttctcaaacacactctccctagacccctcaacaaaccccacagatagctcgtcatcttcgacttcttgctcgtctgacgagtcccgtctgcctctccgacagccgatgagcgtattgtctagtagtcaaccttgcgcgccctgtcggcctctttctctcatcgcgctccaacctactggtggtctctttcgagcgaagcctaacttgccacctgtcgagagtctctctagcgagtcctattctggttcgatagactcccattattctcagcgaacgactgattcggacaatcgacgtgaatccgacgatatgtcttccgagtgcgcgcttgatttcgcgttcgataaacctcattttgtcgtagttgacggatttgagcagaaacctcgacatgctgcctcgaacggtactcttcgagcggctgatactgtgactcgccctataggaaatcctaagtcgaaagaaaaagaggaggaggaggagcgagtatcctcaatgatggttgttagacctgctctggtagaagcccagcatccacatatcacgagcgcgtcatctgtccaacgtcaagattcttatacgctctccctatctgaatttgctcattcgactccttcgccaacgcacgactctactgaagaacttgcaattgcgttcacttctggtagaacagagaggactttggacgagatggatgaaaacagagaaccattctggcaggccaacatagagtacagttctagaagcaatggaaaagaacaggcaagcaacagggtggatgcgctcggtctcccgttggatggtctgagaaagtgtgtcagtgatggaggcgaattgagagttaggtattcagacgatctgtctctatctcgcaaagtatgtccgcccttctctttcttccaccaacggccagactgctgacgaatttcatgttcttgcgacctttcttggcaaacgaaaaggtttcttctgctcctaccccacgcgcgcctagtacgcccatcgaatttgcttacagagcaactccaccaagtccaccctcaccctctggtatgctcgattcatcccaaggaaacacaggttggcgaggatggcttcgtaggaattcgcgctctgggtcaagagaccgacctgcattcgtcctcgaggacggactaggagcagggcaggaagagtccaactggtctagaccgggaacgagtcattctcatgttgtacgtaaacttcgttatccatctgacttgcgcgttctgtctcagttcgcgtcgtgtattcagtggaataaacatcagagaaactcatcgatacatttctcttcgtaaccacacttgatatttaaagtctcctctaagctcgtcgtcgagtcctcacttttcttcaccacccagcctctcgccttcttacccaggcgacgcgagttcgaccttctccagtgcgatccttacccctcctccttccgcccgaactctcgatcgagcgacgttcgaatcacccgtctcgacctctccgtctttaccctccgaaatgttcctcaacccgtccaccggctctggtacaggcggcgtcacgtacccggctcagacgttgtcctcctatcggccgtgtccgacgacttcacattcggcctttgttcacgtcaaccacgtacaccagatcaatcacgctgaccatattggttctggcgactcggcacgctcaccgacgggcgcgttcaaaccgctgatgctaggaccgccgagaaactcgatttcgattggaaataaagcgaagccggccagattgggagagatcagaaaccatcttcctacaatagccggttcaccttctcggattagaccgctttctctttctacacgaaacagctctggtgtcggcgcgaaaggagttcgaaacacaagcgaagatggtttgagaggaggggagcccagcccactcgcgacagagagagacagcttcaactcccactttaccttccctgtgagctcggatgccatcttgagaagaaacttgatcgaccggcagacgaacccacccatccggccatctcatgaaagaacatactcgaccgcgacgacgagtgcatcttcctccccgacgtcgacgaacgcgcatctccgatcgaggtcgagagcaattggaggatcccgagtggttatcattgatcaaccaagattcgatcgagcgtcgaaccaagccaatagcgttcaggaaggattggatgtgggttcaaccggagtaaagatcagaggagaagacagggagcagatgcaatccaagacgaagatgcagacgcagaaggggaagggattgaaggacctcatttactcatttggcgagaggataggcagatggatggacgaaacgctgcctgctcaggctgtattcttactcgggttcatcctcgggccttgtacgtgcctccttcacctcgtttttctcttcttcttcttcttcttcttcttcttcttcactgtgcaatctgaaaccggggagagactaactttatgcgctctaattgatcaacatatacatagggtgctgggtccttggtggatggggcctttcttctgatggcgcgcttattcttaccaagtttcaaggcggtcggtctgcccaccaggccgacaatccttactatcgatggcgcccgccttcggtctcctcgtccccttcgtcttcgcctctctccttagcgccgtctgtgttcggtgatcgatcccagccatactcgtttccatcagcagtgtctggtgctagaccaggtaacagacgacgcgtctggatcctccctagtcttcgatcagactcgcctaacaagtgggtgtggaggaaccgggtggctgcaatcttgagtgggctagtcgttattcccggattgatactggcagtgttgtttgcgattctttaagcggatgggtcgtgtagtcctctcgagattatcgttctgtttgccttcgtttctgtttctcttatcgatcgtgttctgttggacgattatccgttccatcctctctatctactttgtctctttatactcttatcctatcccaatacctctacaatctttctaatatactttctccctatccctctccattcgagactatcttctatcgggaggcttccttgctttctcttctctctcttatccatcttaactttgttcggatgttctccatttcattcccaatcctctacccggattatgtataactaaccgcccttctgcacgataatccctcttctatacaacctcccctgcatatcttccatatccggtgttgcccggaagtactatacccccttcatctatcatgtattcacaaggttctccgcccgttctgaacaaagcttttcttcgtccaacgcaaaggttgttccaggtatgtgctaaacgcccgggaatgttttccaggttagtacacgtacgcgagggcgtcaaactcgcggttgatttgttccccgggaaggaaaaaagaatgaatcttgaaaaggccggaactacggagcgcactaaagtcggaggttgattatggtgccgacgaccatcaaccaacatctcaaccagtgttcactctcgcctcgcgtactctcttgctctcgaggctcggattcggccttggcgtcgttcatgatctctctaacgacctcgacggtgtgacaaggatgaagtgcccacactgcttcgcccgtcgagggatgttcatcagaagcgagaagagggaactcggccgcgccgttgaaagcgacaggagtgctgagagaggtcgcttccggttctagcggagtggacgatgaaggcagaaagatgaggccgtgatgaacaagctcctgcagggtcagcggtcggcctgggttcccaccgggtgatgagacgaatcgttatgaaaagaagtgtctgtcagtctactatgtcgaagaaacagctctacagggacagaggttccttcgtcttcaggacaggaggacgcatggggtagtggctctatctaccttgagaataagcttgaaggaggaatcgaggggtttggtaggtcggtgagtaaaccacgtgatgtaccacgtttactgatacgcgactcaaatctggcgatgtgatcgcgacggattcatccggagtctcgtccatatcagggaacgactgctgtggatcatctaccgacggactgtcagttggaagttgaacagagcttagacatattgttgatcgaactagatagcctgatgaagggttgatctaaatgaaggcagacgcctgatgagctggctggctgactggggtattatccaaagagaaaatccggagcacaatgaggaaggaaaaacagtcagcgcacagaatgagtcgtcctccattgccattgagataaagcagatccgatcagatgtgagtctgaaagtaagttgtgagttgagctcgatgatggcaaggccaacaggttggctgcagcatgtgcgaaatcagcatgggtcgcgtaaggtgtgtcaagcatggggtttgaatgagaagaggagacggatatgccggtctaaagccggaatgtattagaagtctatggagaacgtattagacgacgcgttaggagagagaatagaaaggaagactagagaatatgtgatagaacgactagggaacagagaggcaacgtagtcagaggaaggggttgatagagactacagcgaacagagctacagaataagacggactattacaagaaaaggaactattgcagaaaaagaaacgatagtaatacaaaaaagaaaagcactattaaaataacaaatgtattccaattcagacatgaactagggaaatatcaccaaaaaataataataataataaaaataataaaaaataaaaaataaaataaaaaagccgcgtcacgtgtcagcatccaacccgccatctgacttttcatctgacctttcgtctctacagcccgcccaagacacaccacacagtacgtcctcaggcaaaagagcagagtgaaggattcctgtctcaccccaacgcaaggttagtgtccgaaaatgctagtggagatgaagaggacatcaagtgttgaccctttgcactctttctccttctaaccagcaccatggccgtcggaaaggttagccccagcatcgtccctacagagcaaaagcttttcctcctccctgcctatttttctgtcctcgtgcccttgtgttcccttcgtttgggttttaaaaaaatcatccagccgcatatatgcgttctttcgtcaaaaacttcacccgaacggtctcacacctcatcccttccacatccaaccaatccaccgatatccaccgttaccctgcatgttgtcgacattggggtgttagagacgttaagggacgttgagttgtaatgttagaagggtgtgcaagaacaaagcgtaaagcatgggtcaagcttggtggaaaatttaggggaaagagtgccgagccgacaacttcgacacaacaaaagggcactgcgacaaaaatttctaggcaggaggaggaaaagatatcagcaacaccctccggttcgtgtccatcccaggttgctgactttctcttcctgttcttctttctccttcacctaatagaacaagcgtctctctaagggcaagaagggaattaagaagaaggtcgtcgatcctttcacccgaaagggtaagcaacttctcaatcaactctcatgccacatcctgctccatcagtttactgatcagtctcctccttccgtcctctccatcagactggtacgatgtcaaggctccttccttctttgaggtcaagaacgtcggcaagaccctcgttaaccgatcccagggtttgaagaacgccgatgactccctcaaaggacgaatcatggagttctcccttgctgatctcaacaaggacgaggagcagtctttccgaaagatcaagctccgagttcaggaggtccagggcaagagctgcctcaccaacttccacggtgtacgttacggcctctttgtctgtcgaacccttcttccaagtcttatctgttctctggttctttgtagatggacatcaccgccgatcgactccgatcccttgtcaagaagtggcagtccctcatcgaggcccaggttgacgtcaagaccactgacggatacctcgtccgactcttcgccatcggtttcaccaagaagcgacccggacaggtcaagaagaccacctacgctcagaccgcccagatccgagagatccgaggaaagatgatggagatcatgacccgagaggcctccgccggagaccttaaggagctcgtccagaagttcgttcccgagtctatgggtcgagagatcgagaaggccgcccgaggaatctaccctctcgccaacgttatggtccgaaagtgcaagagtacgtgtctgcttgaatctcattgtaatcatcacctcgcttaccccttctctcgtactttttttttcctcactccagtccttaaggccccccgatacgatccttccaagctcttcgagttgcacggcgagtctgctgacgagaccggtgccaaggtcggaggtgctaaggagttcaaggagcctgagatcctcaacagcgtttaaatctttatataatcgcttttctgaaaacctcaaacgctccctacgaggactttttctttcttcttcctgagtggaacttgaatactgtcaacttaagccatacatcgttcgcctacacccggaaagaaacttgagctacagactacatcctgccactcgcctgtcaccttttgacttgatctgcttccatcactaacgaactttctactattctaatgataactcatttcccgagttatctcactgatctcgttgggctccaaggttcatatgggctttatcgttctcgtttgattgtttactcatagaactgacagaaatagatccgtaatatcaaaacggaaccctatctgccttcttccttgctaactcgtgcaatgttgatctgaacgatcaccctcgatcatccatacgtcttccaagaacttggacacgagtcgttctaggtcttgctgtccagaattaggatccgaatcggcgtggtggatggccctgttcgatcgagtagtgatgtagtgaagtcgtctacagaattggccaaggtctagccagatcgatcctcctttctcttcctcatcttcatccccatccccattcccatccccatctccatctccttctccttctccttcttcttcttcttcactattctcctccctctccacgttcttctccacctcatccactctctcttctcctttgtggtcttctcgttgtttttctattcgaggggacgcgttgataccataggaacaatgacgaatagaccggattgtctgtccgacccgacgagacctcgtccgtatgtcttggtcgtgatcaagtctactttgtcggcgttggcgtcgtcgatggatcgagagagacgaaagagggaacggatcgtttgttgacctgatagcgaataaaagtagatcaagcacgtcacggaatagatcaatctcgagtatccggctttgaatccatcgccgagacgatctatcagacgagagagatagaaaatcaggggaggaaggaaagagagaagagagcgaggagagaagagatctaatgagcggggcaagtaaggatgaatctaggtgaacgagagcgtagaggagtttaagaagagggaacgtctcctttccaccgttgtcgtcgtcggcgtcgtcaacgtcaccatcactcttattacgtccaatcttttcaatgccatcgaccaccttggtaccgccatcagacatgttcccttcgtgcctatgcatgtttccagccatccgatcgctcaaagctctcgcgacttcagagaagacctcccgtccgatgaatcggcagactgtggtgacttcgcgtaaagtcagccggggtaggacctcgcgcaaggttgtttggagaatcagataaacacaggatatgatctcccttggatttgtctctgcgaaatcaagcttggacagggacgggggaagtataaggacaagtcggagaagaacgtgaagcgttcggatgagttttagcgtaaggctcttcagagactgaaccgatgaggtggacgaaggagggtcttgtacaggtcgaaggtataacgtttgattgatcgtcataagcaatccaatgatagatccagcgcacacaagatctatcgtttggtttcatgaaaactgtcagccaacgagctacacgaaaatagagcttcctgatgtctgatagccgagacgggactctgtctcgaaagtcaacgagcagaagaaaatgccgaccgacctggtcccgagtgcacagagagagcttcctgaagaaagatgtcaagctcaaggatgcgtctatcacttaatgggaacggtctatcattccagagaccgagaagcgatggaatcgaaggttgtgtgcgtatctgtgtcaaagaagaccgaggcgaaggagggactccgagtcgattggctttgaagcgagatcgcatttcttccacaaactcttttgtttttgttgtcgatttgggttgaaaagaattaagaatgcttgtttagtctataggcaacacagctgaacacgttaaaaaggcaaaacaagaattaaagatcggcctagacagaccatctatgctcttctctcctcggtgtttgaccacatacagagcctgaacggagaggaggcaattcttatgagcccacgaatggactagtgccgatcatgatggatgaaaacttacaagagccagtcggatctgatctttgtagtcaagataagccatgtctgatgaagcgttggagggaaaggaagtgacgagtgaatgaaggacagaaggtgagcgcatatagtctcatttctgtcagtccggattctagatgctgtcagtagcttttcttcgagaagatgatcagtatcggaagctacctcgtctcgagactagatcagaatcatcgtcaggattacttgtacgaccggtggagccaagaattgtacatcattttgaaacgacaagatcagtctaggttaaaactggggggagaacaagacaaggaattggatcaaattgcgtgttgaaaggcgaaatgagggtgtcaaaagatacaagctccgtagaaaaaggatgatcgtgtagaagattgtacagagacaagataaagattccagaggatgatgtaaccaagagagagcctaaagggatcaaagaaaggaactgccggcaagaagagaggtagagaggaaagaaaggactggtgttgagcttctgttttctagtttccgagcctcatttcgtctgcttctctttcatagcttagggatccttagcgtcttggaaaccatcaacgctccccacaccaagaacaccaacgcgacggggtgcaactcgaacgccgagtctttcaaccagacgccaagaggcagaccagcctggccggtgtaccatcccttcttgacccagtatgccatagtactgacgagcgctagtgacgaggggatagggagaccctcaaagtacttgatctttcctgtcgtatcggcaggaatgagggcgcaggtggcgttgaaccgggcgagccgagcgagaccgcaggacacaaagaacgagaggaggagtgtgtcgacaaaggagtttgcacctagggtgaatagaagcagagcaggagagacaccgaacgagacctaagagaagatgggtgcatccgaacaggaaatacagatcaggatcaggtcgggtaagtgtgttggcggttggaatacaactcagcatcacacttcctgtcaacatgagaatatctgagactcaccagatcggctagactgtccatctcctgaccgagcatactggcacttcccatccaccttgccacctttccgtcgaacacatcgaaaccgaacccgaggaccgggtacaggaggcccatccacagagagctcttgttttccagcggggcagacaggtacttggcgcaagagaagatacacgataggccacagacaccgttcatgatcgtaattaaatcagccaatcggaagtttctgttgttatgttgattgaacaggcaaatgccaatcaagcagcagaagaaacgatggtatcgaaaaaggttgagcgagccacgtcagatgatgaggaaagaaaagaataaatgtgttcgatccagattcgagagaaagagaaaatacaagggaaacaaacgaaaagtcagcgtaagagcagaatacaagtggtttcagagaagtcttgcactggacatcaaacggcataagactaggatgaagaacgaaccggacgagcgaaaagtggccatcgtcctcattgtattgtttgagctggttccgcttggcttcctccatcttaatactagcagacttctgtccggccgaagtacgttgactcataatagttctatctagcaatgctcgcttattgttactatcagtgcaattggtgctgtcgtccttgtcgtcaggtcgagatggctgtgaggaaagggaaaagaggaggagcaaagttgagacttttctcatttggagccgtatgaatggggagtcaatgacgcttgtattacataagcaacatgtatggttagggttagtgctcttcaagatcagatcctatatgtgtacatgaacagagagcttgtgtattctctccttaagtagagttatgagccgagaagagcgggtgttgatgtgggaagggaagagaatgagaaaacaaactggacaggatgtggaggccggatagatgtcctttcgataacatctcaagttgttcgtaacagacaagccatgaagacatggtcagcaatatgacgacgagtgatacatgcttaatcatacatatcatccatggttcacagatagaatcaatactactactactactactattcttgaccgatacaagacaaactaaagagagagaattcgagagtacatgaattgctcaagtctgtagattgtaagcccaaaaagaaagaaaggaaaaaaaagaatacagaccgacgtgtagcttcgtttcgtgaggaaagcaagaaagaaaaagagagagagagagagagagagaagaggacagcggcgagatacaaacaggaaagaagcacaaaagtagaggaaaagcaaaaagcaagcgcaaggacatcggaaaggtcgaatttgattgattgatctgcaaaagagttcgaggctcagaggtaatttggtgccacatagttcaaagctacatacccgttttacgaaacttcgaatcacggaagagacttagcaatctatcaagacaggagagcaagcacacatagaagaaaaaagaagaacggaatgcacttacagactgaggagtcttcgtgaaaggagtgaacagagtgagcagagaccgcagagctgtgtcgcgaatgggttggtctcgccgtcgaaggcaacaagcttgatcggtaaggtgttccctgttgttgctgttgtttaggatcctcagtgttgactgacgtcgaagtctcaacatcggtccgccagacgtctagatgagtaccccgttcctcggctgacacatcgtgatcgaatccatcctcgggctcgggctctggctctgactgaccccacgtccccgcctcttctttccgtcctcctcgtcgggttaaaggtgcccggtctcggtaatctgctgcggtcggcgtcagttgggtctgtccctgcgctcgggcatagaactcgtgcatctgcatacattgtgcgaacagttggctgtagtacgggttcatcaatagctgatagtgggtcaactgagcgatgagtgaggctgggacggctgctggatgagtgttcgggtagacatagtatgccggatgggaaggcgaatatggtcctgtcgacgattgaaacgaaggttgagatgggatctggggcgatcgggaggagtacgtcccggtgctcgtgtcggacgtcgtgatggtgaccggagtctccaagactgatgctcctgttgatggattcgatcgagaggagatcgatggggtggaataaataccactcggtggagacgtctgagggcccaagttggattgagcagtagagggaggagggtgggatgtgctcgaataagaaaaccctgatgggagctgtgtttgaattggagtcagaccggttgagaagctaaacatcggcaactcgaatgggaggagcgaagcgttcggactggtgggcgagtaaaccgaagagaacgcgagtggaaacggcgaaggatggatcggggaaggacttgggtgaggcagcgtcacatttgtcgaaggatgtgtggagttaaagtcaggaagcgagcccacttggagtagtccagtgtgtatatttatgagtcaattgggagagtaaggaagctttagcgtatttgcacttttcttgcaatagatgaacaggacgtacgttggcctgagacccgatcgaaaggatacggagccgagtgaccggatgtattcattctaggcaatcttggccgggaaaactgtatcggttgatacggcgcctctttttctggaaaaaataaacatgtgtggtcaggtggagaatcagtgggtgattagcgtcacagtgctccaaatccgttgacaaattcaagaaagaagaaaggagaatgtgaccgaactgtagggcttttgtttggtggggcttttcttcgcgcctcgctcgttcagctctacatcctccatgctgatccccaagtcttgtcgggatcgttttgggcccaaggagcggcgggagagcgggcttttcgtgttatcgctacttgaatcagctgaggattgaggggagtattctgcttaagagatcagaccaatggggataaagaaggtgaaggaggacgaagaggaagaggagaatcagacgcgtaatagagagcgaggcgaaagagatgtgaaattctatcgaatggagagatcaaagaaagaacgcgagcaagctaaccttgaagggggtagtccaagcaatcctttgcccagatgacagccgattctaggcttctcgggaccggattaccttctgcaaccaaggcatcgagtttttcttgatcgagtgcaatatgctttaggatagtcctcctttggaagtctgatgagatatttggttgtcaacataagaatccgacggaaaaatcaagaaaacggacgtgacgcgcaagttaagagggacgagcatgggaaggaaacagaaggacaagtgagtaggtgagtgttggttcatgagtttgagggcaaagtcattcaccttttcctttgcactcaagggtaaagcagtagcaacggaatcgcttagacatgatcgattgaccgacccgagagaaaggcaaaggtgtattggtatcaaaagggtaggtgagatgatgatgatgacgacgacgatgatctcgtgtgcgtatgcgtgtgtacgcgtgagtatgaagagacagatagaaggagacagaactggctatatggaactaagaatgcttgagaaaggaaaaaaaaaggacttggagagaagcaaggcaaggatggtgttgcatctaatatctaatttcacccactctgtgcatgagaagtaagtaagcaagccagcaaaggtgcaagcaaggatgcaagcttagacgccaggagcccgaagaggaaacgagcaggatgaaagagagaaaaggacaagtaaaaatcaaagtatctccagtcttctgtgggaaagccagagattgcgcttttgaagatacacaggtatcttcgggtatcaatttttcttcgcttcaatcgtatgggcgtacaagactgccagccaaccgaagcgatcttattcggaatttttaccttcggtgtaatctcaagtggatacaaacgaccgagctaatgcacggtcgcatgacgggaatagtcgagatcattaattttgaatggatgcacatcgtcggttaaacagttccatgtggcgttgctggtttccttcagagcgtgtgagaagaatcgatcggcatcacccatcaaagtgaccaaccgacacagggagactgtcactgtatcttttagtcggcgatagagagatatgcgttgaattttatccggaaggaatgaatacattcaactcctctatatggtatctacggaaatcgtatacaggtgggcagtcaccgaagaatgtttaacttggtcacccgaccaaacggcatggctactggattcgttcagtcgccattctaccaagtgatctttatctattcattctaatactcgtcttgctcatgttttctcaaggaaagtatggccgacaatatgagaatgatcaggaggaataagtagaaaagaagggaaagttgacgaagcgagatgctgtaaacattgaatggatgtataaatgaatgaacgatgactaagcatatgatcacgcgtcgacacagagcattgtgcgacgcgacgcgacgcgatgcttccctcagtcatcttggaaacgaacgaaccaagccttccgcgttcgtccatcaacctccagaagcataaaaagttcaaccatcgatgtctccttctctttcgaatgacgatcatatacggccggactctcactattccgccctgcccaatctaaataatgctttcagcttgaagggagtttctagaagttatgaccatcaggtccggccttccctttgctataagccagccgcgtctcatgtacttacctttccatctttgatcaaccttcattcgtctcagtacgccagcctttacttttccaggcttgttcatctccgaccaccagtaaaagctcgagccgagaagaaatggaaaggcgcccaaggtctgtttcactagcttatcgctcgttcctcttcattcgttagcttctccgtccttaaatctgacgatcgcttccaccatcgattaaactcaggaaacccgaagccgatggagagagtgctcgacgttcaacaaggagagctctgttggatcaccggtaccatttatatggacatgcccctcaagcccaatgtgctggacgacatcagcaaagacgtacgtttcgatcctccacgtgcatatacacatccttttggccttatatccctaggtctgatatcacagattctgatgtgttgggaagcccttatagaaatggattaccgcgcctccaccaagagagacgttcttctcgtccgaagatgagatccttttggaggacgagtctggccgggtgaagttggtaggagaaagattgaaacatgtcaacttggttacaggtccgtttcttacgctcttagccatttacaaccaatatctgccgacactatcttcccatttaacctttgcgaaaaaaaggtgtagtgttagctgctctaggatatgaggccgctgccggcgagtttgaggtagtagacctatgctttgctgggttaccaccccgattcgattattcagctaaaccgaaggaagcacaaaagacgaaggtcaaagggaagccagtcttagccgaggctgatccaaatccagagatcgaacaagatggatcctgggtagctctcgtatcaggattagatatcaccggaggagagagtgtggcggatctcagatgggcgcttcttgtcgagtggctgatgggtgaggccggcagcgacctggaccgggagtcaggaggaaaagtctctcaattgatattggctggaaactctttagcgacaccctctacagtagatgatccagacaaagccagggtatatggctacgatccaacgacatattctactttacctatccaaaccttagacaacttgctctactctctagcccctctcatgcccatcacactacttccaggaccgaacgatccatcgggcacgatccttccacaacagcctttgcccaggctcatgttcaaacgaacttctcctcacgattcatttagaacaacgacaaacccgagttggcttcaagtaggtggcaagcggttcctcggaggtgcaggacagacagtggatgatgtcttcaagtatctgccggagaatgacggtagtcggattggactcgtgagggatatgctccactggagatgtatggctccaacagctccagacacgctctgtaagtgacagagttcctttctcatgcttcatcaacaactctacggttgagaaaaaaaatcgagaactatgaaacagaggctgacatgttctttcccatatttatcttactggtccaaagggtgccatccctttgacaaaggagaccctttcttattggagcacgcgcccgatgtattttttattggcaaccagccctcatttcaaacatgcaccgtatcaggttcgtctgatttcattatgttcgacttctattcttcattaaataagataactcatttgacatcgcgcgcaccattcttcatctttatcacttgaaaatgattcagacgcagacgatagcctgacccggatagtcctcatacccaaattttccgagacaggtacagtcgtacttgtgcacacatcttctcttgaggttaagaccatggagtttggagtctttgcgtgggatggcgcaggaaatgaagcgacgggttgatagaatgtctttatatctattctccttgtgacaaaaaatcacgtgatccacttgttccctggtcagcatcttaccccgcatcgtacggtagatatatacctgcaaacactcgagtttctctcaaccaacagtctgtatcatctgtatcatcttcattatcgtccttgaaccaccacgctcagctctcggtcccatcagatggccgaatctatctctacctggaaagaaagaaggaccaggttgttagcagctcttgaccaacctatagaccagcaggatgaagatctcatcggcaagcttatagatgtgacgttaactgaaagtcgaaccggcgaaacaggcgacgctgaggaaggtgagctctacaactacatctaattgatgcacccatattcttaagttgtttctcactcgcacatatgatcccatgtaaaattgaaatagaagttcgctcgaaagttaaggagcttggaatcagaacagacgactttgtgcctgtatcgcatattgctcaaggtcaattcggaacagttagtcctcctttcagcctgcatatcatacccggctgtcctgatgcttgcatgtgttgaagatattcgctaagttgctctaacgattgaaatttataggtagaccttgtcagatgcaagtttgatgatgagctgtattgtatgaagacgatgagcaaggtaacacttcgcagaagccgtcaggtatgccctttcctttcgttcccatcctgtcgacaaactgtaactcaacttgatcctttggtttttttaaacttgaacatgattccaaaacacagcacacctctccaatacctgaacggatactacatactctcgctcttaccacaaactcgattttctctcctcaaatcctgtgtgccttccaatccccactttcgctccatttaatcatggattttatcccatacggaaccctctgggacgtgctaatctctacaccctccagtagactcccagaatcagatgtcaggtactggtcagttggtatggtttgcgcggtagaatggctatccgacaacggttgggcacacagagatctcaagcctcacaactttcttatccgtcccggtgagaacaaccgaatgccgagagccgtcctgacggactttggaacggccgcacaggctctacctgaaggaagaaataaaaacagaaaggtcttacctataacggcgtgcttatggcctgtcggcacaccggattatattgccccagagatcttggaggctcacgaggatgcgctcgtcagggcggaagaggatgaagagagagcagaagacagcgaggagaaatcagaggaaggcggcaaatcaagatcagcagagacagagggctatggcattcaagtggattggtggtcgttgggtgtcattatcaggtcggttcctcttcccaaggatagtctcgaccatatgatctactgactctggtagacattcgcgtccatgcgcgaaatcagtgaacttctttttggcgagcctcctttctttgcagaaagtatagcggatacctactggaagattgtcaatttcgaggttcgtctgtcattgccttgctgtggtcttcttatgtcataaagacgaaatggctcactgaaatcctatcgaactaaaaacaactgactcgaatcaaaatgtaacaggacagtctaaagtttcccccggaagttgacatgtcgagtgaattcgaagatttgatacgacggtaaagctgactcgctctgtgtcttgccttatgtgtcataactcatgagcttttccttcttttgagaaatcacagcctgttgaagcattctacagaaagactaggccgaaacggtacatctgaggtgaaattccatccttggttcagagatgtcatctggccatcgacctcgtgtacaccgccttcaggtaagctaggttcatcatgcatgctgatgaaaaagttcactcagactcatttctgggtggggtttctcttgtacaggcataccaccaccagaactattccttcccccaccccctccggttcctcaatattctcaacatccatttgatctatccttgtcaaatctttatgagggacaaggtgatggagaggacgacaataatcctttcgcattttcagacctgttcatctcttcgcctggcctgtccgtcttacattctagagaatcgcccttacggtcgaatcaagatcctaatcggatgaagctgacaggcatctcatggctcggaggtagtcctcagtcattcgctcctcccgatcgggtcagtagcctaagcgaggcgttcgacaggtccttaatcttccatgatatagccgaggagaaagtcagatcatccgagttggcagatgaatggacaggcttcacttggggacctacgcaggatgcgttcgaagtgaaaagactcaatcggttgcccttagaattcatgactccctttgatcagcccgtgctcaattcgttccctggagaagacgatttcttggcattctctttcgatggaaaggccttggagtccccgttcacacctgcatctatcaaacgccatcgggatcaaacaccgcaccggccgctcctgccaccagactccaaacgcccgccgaatccaactatgtcatccaggaaaaatgtttaccaaacaccagcccgttcttcagcctcattctctgcatcattcccgatgtctgcgccttacagtcatggaaataggatacccagcacggctagtagacggtccagacccgtcacagatgttaaggcgctacagcagatggtagattgcattgggttgagcgccaggaagcgcgtattagagagcgggaagaaaccacggttattagtcctcagacgatggaagaggtcttcaagtcatggcgaggatagccaagaggaggagaaggatcccagagaggagcgtcagataggaagttcgagagctacaggttggacgccaagtccttctcgagctatgcatttcagcgcagacgctggctctccgagtaataaaccttcgtcttggcggctaagaggagaacttagcaaagatgttgatttggacgatgatgatggggtagagattaacggagggggtagcaaagggttttcaaagagaattgaagaactcgagagcaggcggaaattacttgttggagagctcgataaagtcaaggatggcttagtgggcgttaggcagacggttgacaaatggtgaatatgcactttgaatatctgcgttctgatctcttgtatatcattctggttgaaatgtcattataatcgtaggggctgggttttgagagaagggacagaacaaaagaacacgccggggtatagacgtgatacagggggaaatgacagaaggtagggacaatgaaccatcatcaccatcatgttctaaagtggcagcgataccacgaaaagaaatgaaaactgtttaggtgtcgaatgaaatagaatccaactctaaggctttgtctcagccgccttgatctgttcctcaagcgaatctccttccttcttaaccgattgataggcctaagaacagaccaaatgtcaaacaagaacgatattgtgtgagtgtcgaacggatacaaatagaaatacaagagttacgttccacaatccgaaccagaatgacaagaatgaactcacagcacccatcaattccaatccaacggctcgcagtcgaagcttctccctagagacctccggttgagataggatacggtcacacgtctcacctgcaaagtaaaggaagagcgtttaaaagaaggaaataatcgccagatgatagtaaccatcaaaccaatgaaaagaattcagattcattcaagagaaacttaaattacggcaagctgagagcaaatccccttcgttatatgacgagtcagaagttgaagaaaacttacggataacagattcgacttccatctttgcagacttccataaggttttgagaccctcggcagcggcctcttcttccagcgccttcatctgttccggtgtaagacccaacttctcggcagcctgaagcttttcaaacacattcttgaggtgaagacctgttcaaccgtagtcatcaacatcagtatgatatcacaaactgcttcatcttacagagctttcgctcttaagaggtggtgcagaacaggccaaagacgaataaatacgttaaaaagagaacctaccagcgcgaactaaagaaatgctgtctgaaattgtatccatcccagacttggctccatgaaaccatccgatcacacctccaaacgatcctgtcgaagcgttgtattgtctataaattgcccaagaatgtgaatggaatctaagtagatgtttgtcgtatgttaacgaaagatacagagggacgtaccggcctcgggcactgtacgtgctaccgacggcttgaagtagctcatgcccgtacgactctagtaccagttcctctgcctcgagggaacatatggtctagcgtcatttttccaattacggtagtcatcagtaaaataaaaaaacctttcagagctgacggagaaatgcttaactgaccttgaagctttcgccaacttccttctctgcccttcccatatcttccggccggcctgccccactaccttggacaccttccacaaagatcgccaacttcttctccagattcacgacaagtttatcgactcgctcctttcgctccttgtctgccaacgcatccttctcctttttcaacttatctaatctggccttctcctcgggcggaataaccattttgccggatttagaatcatacaccatccgaggggttgatggatcgtcattttcttcaccagtttcggcgtcggccgcttgaagagcttctttcattgatcgacctgtatcatggtttagaatcattcagtcgatttagtacggtgtagacgaacgctgtcagagaacctctacacaaacgacgggaagaaagctaagaaaaacagatgaggaaaaagaacaaacctattgagatttgaccgatgatatcattgaacttttctccaccgaataatgtcccaaacaattcctccgggtccacctgatgtcgcagcatcattcacaatcaaataccccagaagaaaggtatcggtaggtcagtcagtccatacgctcctcttcaatatcgtttacagatgagattgaagaaaattcggagtaaagacgtacgaaaccttcagcgggctcatttcctttacttccaaactcattatacttctttctaagcgccgggtcggaaagcacctgctctcaccatatattcatccggtatgatcaacatctggaggtcgcaaagctagtctgaattttcaaggcatactttggaaaactatgacatacctgataggcaatagcgacctctttgaacttttcctcagcatccgggtcatctctgttctctgttgtcacgagacatgagcggaggcgtttagctttcaatactactgcggctttctttattctccttgagtgaaagagcacgtactatcagggtgaagtttgatagctagtctacgataagccttcttgatcctgaggagacaaaaaatcatcagttgcagatagaattgtcaatatatctcgcttcccgcataaccccaccctcttccaacctcttatcctcgtcggtcgacagattcctcccgtctgacagagagttggctgaacttactcatccgcatcagccgtgactccaacccccaggatatcatagtaccgactctccaatgggcgctcgtttgaacctatcttcctacccttcttctccttacccacctgaccggtgcctgccgatgatgagcccgcgcctgattgcgagccggacgaggtgtcatacgggttgaacgtcggcggatcaaatatccggccacaaggcttgttagagcatcgaatccggaaaggcttagactgagaaacaggactgcgagtgagcaaatcatcaattggcagagaaaccaggcaaagataagaatttaatggaataggaaagtgtcagctgagcaccataagtatacgcgttctttagattcatacgctgagttcgagtctcttaacatgagactcacgtcgaaaagtccaacagagatttacagctacaataaaccccacgaggaggaaaggcatttgatgaagaaaggaaacgataagtacatcatgctcggatcggctgtaagaaagactagactgagaagaatgagcataaggttttgacaagagagctcgaaactgactgtgggcattggacagtgatggtgccttcgggcctaagtctactctcaacgatggtagacattgatctctcctttgtttgcttggatactttgggacagacgaatcgaagagggatgattgtggctggatgagggagcggatgaattggctagagagtaaccggggcaaacaagaatcgacggagaatgaaaacgtcatttctctgtttctgcctttgactgagtattaaaattcctttcgcttcctcaacaacctctagattcatattgttcttggtctcacacgtgttgaatagagcatacatatggacaggatgtgcatgtacagagtagcaacagtacagcataccgattgcacgaatacaacaagaaacaaagtaactctcggccgtctaaagcatcgctcgaatatcttcttctcggttgagtagcctgccttccatacctccatgtaccatgacgacctgtccagtaacatgcccagaggcagaagaagacgccaaaaagaggatctgatttgcgatgtccgatggaagcgcaaactttcggagtggcaccctgatggaagaagagatagaaggacgtggccactcggatcaacagattccatgagacacaccacgcgttagagaagaaaagaaaaaaacccacgtagctatagagttgtacacaatggtagggttggcaagtgcagaagctacagctggtgtgcgaacccttgattccgggtgaacacatttcaatgtagaagttatgcgttatttagtacagactgctatgaagctcacagaaacgacaagaccttaccatccgggcgcgacgacgttgactctggctaaaggggcaatcttgacaatctcattcttgagagagagcgtgaagccgttcatgagagctgatttagtggacgcgtagtctggacgcgcacaagagagtctgttgattcagaacgagtatacaagaatacacagttgccaattgggacataaaagagagaccgtacccgcatggccagcttctccgatcaaaccagcagtagacctaatgttgagagaagaacaagacagtcattaccaaccagatacaaagcaaggtggagaagcctctaacacagaacttacccaacgaagaccactgcgatcttgtgcctgttcttctcctcaacatactttagttgtttcaagaacgcttttaccattatgaatgcacctgatgtccagccacgcagacatatttgggtgggataccaaagaagcttgtatgagttaatcgaggtcaaatagaatagagctacagaggatacccacccgtcagattgatgccaatcgtcttgttccattcagacagcggcatagaagctatcgggtagtcggtgagtccgacatacgcatggttgactgtctcatccaaccgagaggaacacctgtgagcactgaggattagtttcagagaagaagagaagagagaagaggatgccataccaacaaggacctcaactgccttgcccagcctttccttagcatcgacgaagagcttatctacctgactctcgtcccgaacatcagctttgagtgcggcaagacggtcgtgtttgatctctttgagcgagtctgggttggagttgtagtgtgcggtgacgagcgcgccgttatcaagaaacgcctgggtggtgacgataccgattcctccggacgctccggtgacgagcgcatgaacagaatcgagagcaaggtcgaaaggcatgtctgtataagattgtatgagcgagtgaagtaacgagtacgatctatgtggaaacagagtcgaacagatcttatatacctgatggacgaggaggagcaaaggattgactcgattaactcagtcacttccgctttcaccttctccatctcatcggactcgatctctttcgtcaccatcaccatcaccatcaccatcactatcgttcgtcagttctgactcattttgttctaggccattcagtctgcccggcatctacctatgacaagccaattcacatacgaggctccttgtaagcatttcttccaagtttgggcttgcttctcggtatcggattctctcttccttctggctgaacgttctcctcctgatggacatacaaaaccagggccgatatatgcgcttgcgttcaccaacagccggcagcatctcccccatcggctggccctgggaagctgtgtgaccggtcagaactatctccgtgttgtggctcgtacagaacaggtcggtctccagcattctgtcgctttctgtcgctttctgaccaggacagtgttgatgtccctttctcggctgatgatttcgaccatcctcatcgttctacctctcgctctgtgaattctacagaatacctcatcaaatagactatcagcagtggccgaggcacctctcacatatcctgcaacctgtatcgcatgggagccgtttccctcccatcggtcttcgtctgccgccaattcatacagggagctcatcgcaactaccggcgatgctttgcatatatgggaatatatcgcgcctcctccgggaggctataatcaaggcgggctgaaagaagtcgggtcattagctcatgttcgtcttctcgctttctcgtttatcacttatgctactccatactccgagactgtcactcattctgtacgcaaaccaaacctggactcgaacagtccaaatcagcgtcttcatcagggacaaacgcgtcgacaggtgtatacaacagtccggctccgctcacctcactttcatggaatgcgttcaatccgagtagaatcgtaacctccagtatagatactacatgcaccgtctgggtaagctgtctcaaccgctctgtgttccttcacgtcaaacatgcccatagcgaagcctgacggaacaatcatctcttaccctattttgttcaggatattcaaacaagcacggctgtgacgcagctgattgctcatgatcgtgaagtggtaggtacttcaatctcttacatgcacctggtattcggctgtgttgatttgctgagtgctcttcctcactttgcttcctttcatgtgatagtttgacgtagcttggttgccgggtgggacagaagtgtttgtctccgccgggtctgatggatccattcgagcgttcgaccttcggtctctcgaacattccaccattcttttcgagtctacacgagcaccttcatcttactcttctccctcaccttcctcgtcattcaacccgtccaaggcgttgatgcggatcgctttcgatccgtcaaattctcattacctggctacgttcaaacaggatagcggagatattcaggtcttggatatgcgaagcccaggtactccggtcgtcgaaatgagaaacggacgggatgggggcaaggtcggatgtatatcttggggcgagaagggcgtccgaggcaagggtggactttgttcaggaggtgagcgtgctctaccacttctgtgctacattcatagagaactcatcaaactcctctccctctctttctttctgcatgtgccaggcgatgatgctctgcttcgattatgggactcttcgatgcctagtcttccacctcctaactatgcgcaccagtcgtcgattctgccttcgaatccatcaactccgtcatcttctctgcccatatcccgttctacgtcggcttcgtccgaaaagccaccatcggtcccatcaaggaccgagcctagagccgtctttgaggcgccgaccgaa

SEQ ID NO: 3116 - DNA, 10114 bp, Xanthophyllomyces dendrorhous
caagctatgggggccggggctgggtacggtctgtaaaaatatagagcgattcatatacatgcctgtgaaccttttaatttcatttccttccaatttacttgactgtatccgccaatgcttctttctcttcggaggtaacaatcagttgataggccgtttggcaagaacagtatctgagatgaagagagtcatcatcccatgcgctgtgtttcctttccggttggaaacgcgtccagaagctctgaaactttcaagatcgttaaactcctcaccaccatcatcatcatcatcattcagcttgatcatccgttcgatgaaacgttttcttttcttttcctttctttccttcgtactcccttcagctctcgctacccctctcggacatgaatcgcagactcctttcgtagaaccatcaacgatcgagaagtcttaccggccggttgtcatctggcatgggatgggcgactcggccttcgccgatggtatggtaagcaaagctaagcacttcactttcaagattgcttgctgctcacaaagttgtttggatatcatcgtctgacggttggttcttggaacggcggtattgtatacatatgcgggatcttgtctttgatagataggagtaaaagaggatatagagaaactataccctgggatttatgttcaccttgtagccgtcgaaccagacggatcgagcgatcggagagcagggttcgtgagtcccctctttctctacaagtccgatcatgcggtggtagtttacatggatatgggttgatgctgatctttcgatttaacggatgggatatgggaatagtatgggaatgtgaatgatcagatcgataaagtcgcggctcaacttcaagaggttgaggaactcgggcaaggggttagttcaactatatacacctgatatgttgtctcgtttctttgggatattcacaaaggatcaaaaaagttattgaaacagctttgattgtgtatgttgggatcgcaatgggcaacagttcgatgccatcgggttctctcaaggaggccaatttctaaggtccgtcttgtctctgtgctcgaggttctttcagaaccaaacgttctcaatgtgtttccgtgtttgtacgagcagagcttacgtggaatggcacaacgatcctccggtatctaacttgataactgtacgtggtcatgtatacttttggctaggtcggtgaacgtctgaacgagactgaccagttggtaatctcatatttagtttggtgctcaacatatgggaattgcggacctaccggcctgccgaccttcggacgtgagtgctgacatgtgcttgaaccgaacacacgctcatcagtcgatcgtgcgagatgctcacttcgaggtttgtccgacatacgaccaaactagttcttatgtcggggggctcgatctgccgctcgtgctagggtctatacgccctgggctcagaggaacctggttcaggctcagtattaccgcgatcatgatcgattggatctttacctctctaccaacacgtttgtctttctctttccgtttggctttatgtttttcggcaaacttctcaagtatgtgtaaacagtctctaatctcttgcatcggacggacagtttcctggctgagatcaacaatgagagagaatacaaaaacgagacattcgcgtctaacctgggctcgctctccaacctggtcctccttcgattcaccgaggagaccacggtctatccagcgatctcttcctggtttggttcccttcatcctctggactctagtctggactcggccgatgtagcaccagatgaagagagagaaatcccgttatacgatcagccgctttaccaggcggactggctcggtcttcgttcattggacgagaaggatgcgctcaaattggagtggtgcgagggccagcatatggagatccaaggttgttggcacagagtgttggaccaatggatcggaagcgatgtctgagcgacgagactgttcttgtgtcgatcgagtatcatctatccgactgttgatttgtcgaacgtctgccggatcttccgagagagtctttttttatttctttattttaatctttcttcgtaatgttggacatgttttctattccttaaccgcagtgtaacccacacgctgcgggcaaaccagtttctcttgtctcggtctcagttgggtgaactgatccagaacgaggagaacagaatagcccggctaaggaaagaaggatagagaacacgaaagaaacaaatgacgacgtgtgaggagcgaccgcaaagggaaggcggagggaactgctaagatcatccagtgttggttcaaaattctacccggctgattcggccagtttcttccccatcctctgttgtgtcgagccttctgttctctttccttgttgggtgttgttcactgtcttcatctgcgttctttccggttctgatagttccctgttccggcatagtttcttaatatcgttgtttctttgtttcttgtccggaatagagagtcacgaatttcttgcctcgtttttcaatctacttaaaccctatcgccgctttttcctctctctctccttctctcctttctttcatccattgcacacacaaatatcatcttcctcccttctcttccctcccttcttccctaccattcctaaccaaaccttttgatcacccccttccccttccccttccctttcccaatacatcttcaaaagaggcttgcctttgaatctacgctctttacaacaatcacttttgcaaaccgctatctttgaattcagcctctgccttaaaagagaaaaagaaacacccctattaactcacacaacacaccgaaccatgtttgcttctacttctaccaccaccgtcctctccgctcttctgctggcctcgtcctccgcgatggccatgccttcccttggtcaccacgccaattccgctttgactacgctctcccatcttcccattgttggtggatacattgcacccaacggcttgattgagacctccgttgaggctgcctccaagagggacctcgatagaaggtactatggtgactctagaggattcactcgacgtgagttccgactattttttctttcaatatcattttctctcctgttgttgttgttgttgttgttgttgttgttgttgtcttctgtttgccaagaagccaagatcgcacgtgagggaagacgcgtgagcggtgaccgcgccaagagacgtgtcaagatttttgttgaccctgttttctactattcactttcattctaccagccgatcctcttggtccggaaaagcgagcgctcgctactggctggtcttcattgggctgtgtgaccgagggaaagaatgtgagaacgttgagcggatacgcatactacgctgggtctgtcactccagaaacttgcatggcaaactgtctgcagaaggggtacaccatcgccggtgtcgaatggggagatgagtgggttcttttctttctccttttttcccggatcggtagcgatgagattacccgtttagaacttttgtctgatcaattactgatcttcacaccttttccatcaaacaaggtgttattgtggaaactccttcgctggcggaggaggggctgcatcgaccgcttgcaacgtggcctgtgtcggttcgttcgcttttcttttcgtttctcgttccctcgagcaatcatgagaaaaacaatcagtagctgatcttctgatacgtctgttcctcgacctcttcaggtgattcgtcgtccacttgcggaggaaactatacattgaacgcttaccagtacaattcaaccagtgccagtgcctctgccggttgctctgtcgcggctgcgaccagtgtgacctcgtcaaagagtgcttccgcttccgcttccacatccgcatctgcctcgtcgtccgctttccaaacctctatccgatcgtcctccgccgttgcttcttccacctccaccgcctccgccgcttctgccaccagcacgagtagctcgtcgacgacgaccgaatgggaagccctcggatgctttgttgataacccatcgttacgaagcggaaagaacgtcctgctcggttccaagttgacctcgacgaccatgacgatctctacgtgccagacccgatgtgccggacagggctacaactttgccggtctggagaattctgacgagtgctggtgtggagatctgaccactgctgatgtcgcgggtttgacgtcgaacacagtttggtgcaacatgccttgcactggaaagagctcggagagctgtggtggtggttggtccctccagctatacgagcaggtcgatgtcagcaccagttgttaaatatcgtaacaacgccaatagaagaccgaaaggacacgcgcccctctccctcttctcgtatcctaccctatcgtcttttcttatttatttagtgttctgtgaacgtctggtatatttttctctcctttttctctcttcttccttctctctccaccttggtgatcgccttggttggtcggactggttccctccccttatctctgtatatatctcgaagtacgctagttcgtacatatctctagctttgatcgtatctatctcgatctagccatatcattatttccccatctctctttcctctcggatttctctcacaagctggtcttgataagagttgtttcgaggggacaagatatgagcaaggaaaagggggctccctccgtttcttaatcgtattattattattcctcggtgaagatcttcgtctgtacggatttgatatctatcatgtgctttgctttgcgttttcacttgttctgtattgcgtaaaagacgagacggacgacaacgacaaaaaggggaggaagagagaaaaagaaccgtcttgtatatacctcggactagccggtttacacacacacaccctagtcaatcagtctgcgccttacgaagacgacttgattccctgaatcgctttggtcaactctgggacatgatcgtagaggtcacccacgagtccaacatcggccacttggaagatcggtgcttccttgtccttgttgatggcgacgatgagcttgctctccttcattccggccaagtgctggattgcacccgaaattccgacagcgacgtatagttctggggcgacgacctttccggtctgaccaacctgaaggttgttgtcagcatatccggcatcgacggccgctcgggaggctccaatggctataacaagatgaaatcaatggtcaaccccttgaaggatgaaacttgctagacatgaagaggaagggcagaaggaacgaaccggcaccaagagcgtcagcgagaggctccatgagtccaccgaactgctccttgttcttcaaagctcgtccgccagaaacaaccttggaggccgagccaagatccggtcgagccgacacggtttcacttgtcgacacaaacttgactggggctagtgacgaaagaacaaaagagacgccgtcgacaagtattcagcatcgagcgatcagaatagatttgagcaagacgacgacaggaaaacgcacaggaagcaggaacggcctcaacggtctcagcttcggccgcgccaccctcgagagcggccttctcgaatgcggtcggtcggatagtaagaatcttgacggcctcggttgatttgatctgggcgatgatgtttccagcgtctaagaaggagaaacatagaaggatcaccaaccgagagagacaggaaacgttaggttcctagaccgtgaagatagaagaaattaaaagaagacttgcatatcggccgagtgaattgctctccgccggcttcgatcttgacaacatcagagatcatcgtggtgtccaacctaacatcgaacgtgaccaacatgattagcgcgcgaaggccaagaacgagaaaatgagggaaagagtacgaaaaactcacaaagcagatacccgggggaacaagtccttgccgactgccgagtgagcacctacaaggtgggagaatcccttggtgggaacgaccgaggccaagagaggtgccaacgcttgattgagggaggataaatgagaacgatagaaagttgagacgagaaagaaagaggtcagaagcgacattgtttccggtgcgagcacgataggaactcacgctcagagaggtagtgctcgtagtcgggtgatgttgacgaaaagaccttggacaggccagggatgctaagggaaggaggagagttgaatagatcagacgtgctgcaacggggtttccagaagaaggtgcacgacctacctcttgaccttatcaacaatagcctggacgtccccttccttgccggtgacgagggccgagacctatgagatagaggtacacattcgtacaaaaaagacaccaatcagagggattagaggcgaggtctttgttccgatgcttgcaaagtaacaagcaaagacagaaggatagaagcctagtgatttctgaactcagagtagagagcgaccgtaggaaagaaagagagagagaaaaagaggggaaggatgataaagagaaaagcaaagaacgcacgtcgtcgccgatagccttcgcagccgtgatggccgagagagacgagggaacaatctctcctcgtttgtgctcgacaaaaacgagagaagaaagcgaccgggcctgaagcaaggaagacgatctagagataagcgaggcaagagtagtagctgaccgagcacttgatcgaagggcgagcatggctatcgacgttgtaggatggtgtgggatggacggagaaagaaggaaggaaggttagatgtcggtgttgcatggcgtgaatcaggcacgaggaaaaagagacgattcattaggaaaagtctctattcgttttgccagatcgtaataggagatgtctattgaggcgatagtccgcccgagtattagagaaaatcgacagacatactagagaaaatgtgtagtcgagggagttgcatgtggcggtaggcaccaggaaccagagggcgtaacaacgtgtgtaaggcggtgcttgcataaggcaatgcaaacaccttcccccttccatcacttctcgagtcgtcgatagtcgcttacttcgactgttcagacgctgatcacttgaacttgaacatcaatccgttcaccaccctgacatgtcactctcgatccttgtcccgatcgttctgatacttccgatggcctatgtggcctactcgatcgtatttcctgctgtgagtcctggttatgacggtctggactccgtgccgaattcccacaacgaaggatacacttggattcctctggaggcccagcgagcgctcctgttgaggacgtacaccccaaaggaacttgctccattcgatggcactcagagcgatggtcggattcttttggcgatagacaggaaagtctttgacgtcaccgccggtcggacattctacggacccgatggaccgtacgggaactttgcaggtagagacgccagcagaggtatggcaaagcagagctttgagttgggtacgtttgtttgactcttagtgtattataggatgtgtatataagattaggtactagtggatgagtgaatactagagtaccaaggcatgctcatctcgttcatcctattaactctctaaacagagatgctgacaccgattgatcagccgatcgataagctacaagacctcacgccttctgaaatgtcagtcagctagccagtttgttattctttcttcggttttcagctcacaatcatatctatatccaatttgcttttagtgaaaatatgaacggttcgtatcggtcttacggtccggattgaactttatcagaccagtcaatctcacttctatctgtctctttctcttaattcctctcaaaacaccctctctaggctggatcgaacatttcacaaacaagtatatcatctgtgggtcattgatagagaacaccgattcatgaactacttttagctctcctttcgatcagcaaggtatttgttttctcgtcagatagtatctttcaagaaggaaaaaaagacagagcatacatagatcatactggtacaacctcatcaaacccacataaaaacatgtagaggaaaaatggaaagctcatgcctagggaaggcaagagggcatagacggtctatatatacagaggaaggttgaagaagataaagctctcgcgcgcgcgtgttgacaaccatactctcaagctgttcgggagctgatgggcatccccatgaatgacgcacccgtatcggccattgtaaattgaggattcagtccaacctacacacacacaaaggaaaattgcgcacaaaccaagaggaaggaagcctctccgtggtcagtcgggttaaatcaggagcaattggcttgaatttatcaacataaatagtgcaaatgtccttactaaatgagcggtctctgacttttcagctacctcatccatagagtaaccgtgtcccttcttgtccgctggcatagcatcgtacacacttctggcatactccggagcgacagcgtatagctggatcagatagttcctctgtacaatcgaatctgcgttctaatattgagagtacagatcggaaaggtaaagacagaaatgaaagacgcaggtcagtagagaaggaagacgaccaaccctttggacacgtcactcatgaatacactcaccttgagcaatctagccgtgtttgaatgcaagtttgctcgctgttgatcgttcatcacccgtcggtaaagtactctgacctggttatattctgatggatgaccttgctgtcgatagtaactctttctcgatactacgttcgaaccgacctgcatcggaatctccgcgtaggcttggccgccaaagccaggtgttgaatttgcgcttggctcggtggagtgatacgagttggggaagtagtgtggttttccagagccgtttccatcagttcgcatggtgccattgaagttatcaggcgaatggaacttgctcatgaacgggcctgcccgaatgtgtacatattgcgggtatacgatcagctttagctcttgaagtgcacacgaggaaataatatgggagagaatggactgacagttgacgggaatctgatggatgtttgcgcttcccaatcgatgatactgagcatctcggtagctttggtgatgatgaaaagcagctccagtaggtataaatccctgatctgagaatgagtgctattcggcagatggatgctttgttactcacaagaacattctccattggagaagtgtatctgggctggcttcgattcctggaacgagtgatccaggggagaatgcagcttgctcaacatccctatccgattgagggaaacagattttattttattttccttgttagaaagccaagtaggagtttgagatacatgacagattcgaagtcctcaccgatggtagtcttcggggttccggtttaatatgagctcgccgacttcggtcatcgagtattctcctcttggcctgtaaacaacggttgtatcagtccgttctagacaaaatcactctgcctcttgcgcgaagatgcgttgcagaaggaacaaagggttggaaaggacacttaccagaccttggtaacatcgaatggatcgaatgcacaagcagcagcctctttgggtttcatcacctggacgaacagtgtccacctagcatcacctccactttcgatatggtcgaatagatctcgtttcgcgaagtctgggtcctctccacattgaatcagcgcttcttcatgggtaaactgtttgacgccttgttgactcttccagtggtactgatgagaaaaatagatatgtcagagaacgggtgattcagcacacacatgcatatatttcaagcgtcaggagatagctctgagaaatgaaccaccaaaaacagaccgaccttgacaaagacagactctccggcgttattcgtccatcggaaggtatgacagccaaacccagacatatacctccaaccgaccggggtaccataatcgctgaacaacatcagaccagcatgctgtgactctggtacgttcgccagaaaatcaaaccaggcattgtaatctaacaagaaagatttactt

SEQ ID NO: 3117 - DNA, 4166 bp, Xanthophyllomyces dendrorhous
tcagggacagttagtatgtgtaacgtttgtggtagcaaagactagagcgcaaagacatatgtgagcattatttcactcacgggtttcgctgttgagacctgatattgtcagggcctgacagaaatgaacaagaatagccgcgcacatggttgagacttaagaaccccttcccgttacccatttagggctgtacaaaccttgcatgggatcccggacaaagaacactggccaagaaagcccgacgagatcgtagtttccgtctataatccggcgagaatcagaaaccgtcagtgatgaagagaacgataggtaaatgatgttgacaaagatcgttcgatttgccttcagtgtaaaattttgtagcaaaccctcgaggattacgagcgctatctggatactctctctacaggtgaggcgggcgcacaagaggaagatcgagaagatagaaaagagaaataaggaaaacgatgtgagcagtgccggatcggtaagagagaagacaagagtacaccacgtacaccgtatgtaacctataccaatgaacccagaaccagaagtcagaatttcagcgcaggaaaagaaagaatttgaaaggagaaaaaggagagaaactcccttaagaaacagagacacacggtcgagaacctggtataacaaggagttgactttcccatctggaaaagctttgctttcgtcaggtgagaaacatctttcgttgtggtgaacgttccaaaagctgaagatccagctgggtgaacgattcgttcctatgacatcccagatagaacaaggattcaagtcaattttactctttctatagcgcgctgtctttgctcgtcccagacagagagagacgaacagcaatcttcatacgatcgaaagcctgttgtttctccaacaaaaggggatctccctggtacggtattcctccaatgttgagcgcgattctttgtccgttccgttttatcgtacgtgaagacagaaaagaatcagaggagatttacttgtcggatcaatcaatcattccgagagcctaatacctccagatggcgaaacctgatgaagacaaaccctgaatgaggaataacttgtccaaagttactcgtgtagaatggagagttatccttcgcgtcctccttctcaaccattcctgccatggccgatcccataccatcgagagaagactgtgatcaacatactcgtctaaaaaaaacagaccaaaacacagaagacagagaaggattgggaaaggacaaagacagagggggttactaaccagcgattcgagaagcagtcatcgccggcccatcgttcaaacctgagaacgtctgagatcgttgagtaggcctcggatcggcgcctgggatgtttgaaaggattgatttagcaaaatccgtcatattcgttcagatccgatgagtgtatatatgtggaggaaacctggttgagagaaaattgatgaatggaggattggagttgaggagagggagagaagatggatctatacgatgggatagactgtctgtcgagagctttataagtcacaatcgatgagtagccttgtgtcctctgtttgagatcgcgtacatatcgagtcgatgaccttattcgatctccaggacacgcgcaatcatgggaggtatgcaagagatctcgttcgagtggctaccgagagcaggattgaacattcgacgggcgaagagggtgaagaaatgatgaccataaaggacaggcaagcaggggaagagagagaacggaagcaagggtgatgtcaggagacagtctcatcccgatgttttgtacactccttctgcatcacacgccggcaagaatagatctcgaggcctggcggcgatcgaacattgaaagaaaagacagggatgtgccgactcatgcgttttcgacaataagagaaaactcttgcagtttcacacctcaggacggcccgcggagattaggacattttgaagggaaaacatcatgttaaaagtaggaaaccccaaaaaaacaaaacgaataggatgataaatacgaatggcaatggtagaagggacaaatagatgcgggtgttagatgtacaagttatttattacaacaaatgatgagtatagatgagaaagccctgatcgggaagagaagagaacgcctttttgtttgtcttgatctagataacgtacgtgaactcatcgttctggaaatcggtgatgtccaacgcagcgttgctgccgaccttggtagcctgggcagtctcctcttcagtctgggcgtcgacgatgggcgctccgtacttgatgtccatcgatcggtcgtgaatctttgccggctttccattcttaattcgagtcttctcctttcgcttgttcattcccatgaatacgaaggcgaggagtccggtgacaacggcctgggcggcaaagatacccataacagagccaagacccttgtggtaggctggtgcttggttggcagtgaacaagagaggaccgacgatgtttccggcggaggcacccatgttgtagtaagccaacatgaccgatcgcttagtctgaccaccggtgttggcagtaacccaggagacgaggatcgggttgatggcaaagagggcggggaagaggtagtatccaaacaacagagggccggtactgttcggtttggaacgtgggatagcgtataacaaagtgctaccgacaatacagacgacggtcaaggaagcgatcataatggacttgatcttgaacttggtggcaaccaaacaggcgaaggcgatgaagataagctggagaacaccgaaggggatgttgagcaggatggtcggtctagccttgaagccaaagccgttgatgatgagcgggccgaatacgttagaaacactggcgcccaagttgttgaacaaggcgagggaaacgtagagccaggtgacgggcgaccaggaggcctcgatagcgtgtttccagttgaagtgggtagactctgaaccggcctggttatccttgactcgctgaacagcccagactcgctcttcttcggtgaggaatcttgcagaagcaggagaattatcaagcctccagtagaggataggaccagtgatgacggtgatgactccagtaataaggaaaagaatctggtagacgtagagacttccaccgtgagcgaacgaaacggcccaggtgaggaaggaaccgatgatagaagctcctccgttcattccgtaccaagctatattgaatcaaggaatagtgttggtaatgattgggaggcgcagaaaagaattcatatgaagaacgtaccagcaactcggataggctgttcacttcgtcggtaccaagtagaggtgatcatggcaaagagcggcaagcaactggcctcaaagagacctgtaaagaaaaaagaccgagagtgattgtcagacaaaagtgcagccgaaagaatcgcgaagttttaaatgactcaccaaggaggaatcggcaggcaagcaaagctcggtagttggttgatgcagccaaaccacacctggaaagagggagaaacatcagttttagatacagtcaatcgagctgatttatacgagacgagttcgtacattgcaattccccaggcagtaacgatgaagggcatgagatatcggacaggaacccggacgatgacaaaggcggaaaagggttgccaaccaagttgggcctgtgtgacaacagcgacaatttggtgatcagttggcgttgtgacatggaagaatgtgagctgtgaggaagatgattgaggatgaacgaacccagtaaccagctgaaccgatgacactatactggtttcccaccaacttagcctcagtcttcattccaaagacggctatggaaggtaaagggaaaaaaacagttcattagcgtcgtcaccaagaggaaagtgagcgtccgataaacgcacctccatatccgatcacagacttgtcgagaatctgcagaaagtagacccagataaggagagggaggataacctgtttatttggtagagggtaaagcgactgcgcgtcagccacaaaccgctctcatggatggctttctgggagaaccgagacaacgaccagccgacgacatgattgggagaacgactgaccttatcaatctttcgtctaaccagacttgactgaatgattcatcagaaacagagagtgg

SEQ ID NO: 3118 - DNA, 13702 bp, Xanthophyllomyces dendrorhous
gatgtcggtagttagtatcggagagggatctatggagcgcctggacagacggatgagcctacctgttcgttcgtcatagggatcgatccggcagagaatccggggacgtgtctatagaagagaagagaaaatgttagatataatgacgatgaagagaagtcaagtcgacaagagaggaatacgtactcgaggtggctctgggttccactcaactcgaccttctcaatcgagctggtcttttgaagcgaatcgctcatcgtgaaaaagagaaagctgcgtcgactgtgtgggtggggatggttggatgtggatgctaggtgctaggtgtgttggtgtggttgtgtagaacgagagctgaaaggtggattgatagtagggtgagagaaaaaaaaaacagaatgagagaacgaactgagcggccttatatgttgatcggaagagagaactctgtatgggatggattaatagacagattcattcaacgcacgacgagaacatcggaaaaaaagaaacacacgcccgctctatcgctctgagaacgcgcgaaggtctctcagctcgcatgcaatgaggcaagatctagccaaacaacaccggtcggctatcgatggttagtgtttctctctctcttcaatcagccaagacgcgtgtggaaataagcagtggagaagaactaattcggcgtgttaggagacgacgatgagaatgcatgtctccggacgtttgttagcatggccattggatggcggacgagatctcacaccagttgaagcatccgacggtatcatcaaagtctctcccaccagtcttcgcctcgatccccgggtcaattggagaaggtcggaccgagttcaggagaaaaatccaacgttaaccgagaaaaacggtgtaaagtggattgtaacccaagaaaattcgttcggctcaccggatcgattcgccgaagatcctaagttctggacttttgttctctctccgcgtgcctatgtgctttctatatgtgcctgatggtatgtatctgtccctctctctatcgggcatagcaggatcatgtgtgagcgattttaatcgccatggttctttcgatcattgaaacatgaatcaagactgatagcatacacaaagcgaaacttggcagcacaggccagaagacagcacactggttgcgtctgtcctcggccggtatccagggagtaagccggtattccggcccatgtatccggatgtgagtctgtcgagtctacatccgttttataccgtaccataccgatggtccgtcgtccgtcgtctcctctaaggtacaaggcctgcatcaattcgcgtctttacacggtgatcggcaagctgaactggggatcagctagggcgaaaaatacaatgaacgagacaaacgcaggtaggctatgacgacacctagacagataaaccccgagaaatcttgaactggggatcagaactctgttattcttctttatctgtccttctctgcctttaccattgaagtttgctactcttcttcctcgtctctgaatgctcttctgtgtacggtacatgattaagctttgtctgtctgcaggagaggtcgaggaagcaaacttgagatggtctatcgataaccgagaaggacatgaacaacaaacactcactccccttcccactatacatcacccacaactgaatgacacaaaaaagataaagattcagaggtatagacattgatattgataagaattcgttcatgaactgcgtatcatgtcaaccgagtggagaccgaggtcttgatcgaaaggcctttccacgttcggaaatagtcggaccctagcttagatgttcacagctgacataacacaacatgatatatatatatatggtgttggcccatctttcttaagtctgtctgaatgattgcttgcgggctgaatgctgtgtagattcgaatcatatcgacttaaagaaagaatcatcggcattgtgtatagtaaagtaaacaagatagggacagagaacaggaccttgaagctagcagcagccttcaatctcgcggcacctcttactggttcttcttgtcggcagttacagtctgaattcccttcacgttatccatcctcggcggcacgctcacactcgtcaatgccatgatcccgaaacccagaatagggatcaatattccgaacgacacacccagcatcgtcaggatcgaagtcgatgtgatatcatatcgggctaacaacgctgtcttttctccggttgagtggttaccgtttcctttgaagggcgcaacaagattcgagtaatcctcagacgggacctcgagggtagattcctgtcgacgttcagcctggacagcagccatctctccaacagcaggatgaccggtcagcacgaccaagtgcgagtctggatacgcctccaagaaagacttgaccattggagccagcagagcatctaagacagtgagtgacggcgatagtgatgatgtcaaacgaaatggcttatcagtatcccatccaggcacatccattctccataaaaggatgaaccctgaaacataccctcccaggcgagcatagtctcccgactttcaccctcgatctcctcccgcttggccatcacttgaaccaatctcatcgatctatccatctcgagtggcttcaagtcggtgatagattctccggccttcaacgtgtctactcgggctccacacgatctcgagagcgactgaatcgaagcttctaagcggtcaactgatccagaagctacgtaagggatcgagagcgaggatgtctttaggaacggagagagaagaggagtcgatcgcaagtctgatgcatggagctgatgtcgcggaagagagaagagaaagagttgagacagagtggattcttagcattgacaactatcaataaggagaacccaagagaaagtgatttggaagaagcctacagattcttgactgatgacgagtactcccttcaatccacagagttcatcgccagagaggagttcatcaaacacggaagatgccgaaacgataggacctttagcttcgactgcttgttcgagagattgaagtcccgatagactgcaccagaaaacagcccgtccagagtggaaaacacgtgtcaggtggttgattcagtatgtttagaatgaacgatatgaagagtagaagagctgaataaagtggaaagaagaaaagagaaagaaaagggatcttacgttgaatcactcgaccaagcgaccaatggtgacgtcccaacaaacgccaacacagctggtgagagagtcagagtagaaataagagaaagagcaagaataggagatcgcatctttcgatagaacggtgttctttgaagcaaagtagacaaacgaaagtcaaggatggaagcaaagatgtagtatgtatggcgagggcaaatcgatgtaaccccacaaaagcagtcgatagcaatggtcacgcagtgttcgtaaccctaattcgccaccgtatcatggtttcaatcctaatttgatgtctgtcgctcgttagaatctatcgtttatcgacagatttttgcccttcagatgattagatataactgaggtcgaagaagagatgactagatttccaatggaaattgctgctctttctcatttcttttaccaaagagatagagaaaaaataatatataagatacacatacataacgaagttcgtacctagaaggagagtctaagcgaatacacaactacacatatataactggcttgctcgtttcgacaagctccagaatagaatagacgtcagaacgacaggccgaaaagaccgacccaagacagaagaggaagaggaagaggaagaggaagaggaagaaggagacaaaaatgaagaagagggtggttgaaggaaagaggaaaagaagcaggcatgtagaggaacgaatagaatccgaaggctcgatcttttcgattcaccgaagacagaaatcgagaaggcagggagagaaaactcggaaggaagcaaagacagcaaatacagggttcaaattcttgtaagaacgaaaaggcatcgaagaaagggaatatatggatacttttaatgaagagaccgaaagagtggacggcatatgatgattgctcgttaataaataaataaatagaaaacgaatataaagaacgaacgaagaatgaataaataattataagagaatcattttgggtgatatgtcttgggttttcctttggacaaaacaggtaaccatgcagagaagagaggacgtgttggacaaggaaatgaagcctgtagttcagcttgacttccaccttaactttccacgtgagcaagcttgtttttaactagagatatcatacaacaatctttattgtcagctctcgagctatgcttgccatgtactatacgtcagacttacagtctctgttcttcttcatgctaatttctaatcgggcccgtagatctttgatgatgtcgtctcgttctgctagtcgactctcgagcgtggtaatgtattcttttcttcgctctctaaatcgacgggcaccaattttatttctgtggtgccgacagaaggcatcgaaggatgaaaagttagaacaatagaaagaagccaaagaagaggattgcctgaatgactaaagcttacctgagctgttttcgggcctttgcgttgagcttttcatactcctccttaccaacgccccagtaatcatcctttccactcaagtcaggcgtggtggctctgcccccattctgttgacccatgcaaccaaaacccatgtcgatgtcgccgagatcgttgaaccgactaggtctgtctggaccatatgaatcaaagtcgctcggtaggacaggcagaaagtcgtcctcatcttcggagagttctcggatcgatcgagtgtcggacgagtttgaaggaaccactgaggaggatgacagtttggatatgctgtctatcctctcctgtcgaggggacatggtgtttgatggcttagaagctcgagaaagcagattagtgggttctctggccgcgttggcaagcgaggactttcttgaactgggccgagatgaagaacaggaacttttgagagcgtgtcgtgtactgtcgtccggcgggagctcggtagcgaaggaggaaacggctgaagggttgggtgcgttatgtgacgcggtgaacggcatggggtccgaattgtttctgtttgcggcatattcgttaggccgaggttgagttctcagtggcagacgagagagatataacccaaacatgttctttgttcgctgctgttcctgctgctgggctggctgatacgatgggtgggccggcttgttggaaggaacagagagcgaggaccaaggtctttccaaggtattggttcccggacgatgggcgctctgaaagggtgagcttgcatattgatcgacttttgagccaggcgcgggagggacgacccaatcacatggttctggcttgaacgctcgtatcgattgggcatgatccgggtatgaggagagtgaagaatgagtggagtcttgatagaaggttggaaagtagctagcggtctctggttggggtaaaggcgtgctgtgtggcgatcgagagacaagagatcctgaggatggatcactgtccgggccgctcgagtttgttgagcaatcggtgttgtgagctgtgcttggcagacgggatggaggaatgccagcgtacgagccatattcattctttcgagatataaagaggagaagcaacgaaaagggtgcgggttgatcagacagataatcatccgtttgagaggagataggttttacgtacattgatcaggttgtgcaaagcttcggtcgtgggtgtaagcacagggcctgttccagagaactgaagatagcgagagagagctaaggtcaaagaagaatgaaagggttggtttcagactggataagaaaattgatgaatttgcagttcgcatgagagtgaataagagcgacttacaccatgtggatctattaactttccccagacgtccagggtggctccaggaaacgggtaagcgtcgactgtgcccagtcatggtcatcaagacagatatatggaatgtcagcaaatgcgcttgcgtgtatagagagagtggaccatgaagatatctagacttacaatctcgagaactgattgtgaatcaaaagatataataaaaatgtggaccgccaacaattcgagataagtgttttggtcaagtcttgaacaccaatacaacagtaagacgtacggtgttccccaaaacatgtctgtcgttgtggcggttgcgtttggcgcttctaacaggatccgctagttttccgggtggtgcctttttaaagggaatttggatcaagtaactgagaccgcagcgaatgtattatctgcacaggcaagcgaaggtgcctaagaaaaagattgctaaggccgaggtgacagagaagagagacgaaagcagaggtggaagcgagcaggtaagaaggaagagcacgacctgagtgaaacaatcttcggagagagagtgtgcgtgtgtatctgagtaggtagatggataagtggatatgagtatgtgagtgagtatgtgtaggtgagtgtacgccaaggcttgaatggagaaagatgtacggatgtttggacgtgtgcgagaagaatccaagtagaacagagaaggatgtgagcaattccaagaggaaagaggtaaaagtaaagaggtaaaagtaaagaggagaagggaaacgctggaaaaagaagaaggggagtgtttattaagaacaggaacagcaataggagtagggacaggaacaggaacaggaacaggagttagcgatcggcaaagaggagactgatgatcagcaagccgagatctatcaggatcaagacggccgtcgagtgatgatctctcatccccctccataccgggctgagggaggagaggcagattacacataagattggaaaatcaattaaacccaagactgtatacggggatggccatcagaagcggccgggcggacagtcccgggacggctcgatcggctcgcgcctggctgctggctgccgtcgtctgtcatcgagaatggcggaaaaagaaggaaagtggaggtcttgccgatgaagggtcggccggtgaagatcgcacaaacgccggtttgaaaagcgcagcaaattgccctcctcgcgagatgccacccggaaggtgagttccgtccaggatcccgatatcctggaggaaacttaggatgagtaaaagaacgacacaaatcgacagaaaagaatatgtacgaatgttttgtcatcctgtagatttcgggtgtgggtgagtgtgattgtgtttatgtgttcttcctcagtcgttactatgagaaagttatgtggtctatctgtctgttggctcgatctgtctactccttccgtcgatgttctcattctgttcgtcttgatcaatcgtccgtctaagcatcgaacttgcttggggacaagtaatcaccagttagacgacagtcatccagaatgaataacgtgggttttttatgtatcgtgtctgaagagttttaatatgttgttcttatcactttcttgtttgttcaacaagtaaacaatgcctatcatctgtcgagcattggactttttaaagatatcctagtccatccctcgtctctcgatggggcatacatatatatatttatcttttctgagccatttttgattccgacgagaccatatgcgtgtggtgtcgtcaacgggctcacgtatggagttagcttttagccctcgcttgttttctcggtacaactaatacgtcgtcgcctgattgctctatccgattttctagttctagttcatacttgtgagacatcttggcacaagaaaatcgaacagataattcagagtcttgttcattcggtctacattctcttacgaggaggagacgaagaaacggtacatgacaaagtcttgaaacgtaaaagaccggtctaattgtgtcgatatgaccgccgaggtggatgattctgttttgtcagcatcgttccggctttctccacttcagtcgagtcagcaactcggccaattttttttttcaattgctcgatggtattggaaagcgtaaatagatatcacacacggtccgtctcgtttgtaaacaagaaaaggaatcttcatgaatttatagtccactaatccgtttccttggtcttcgcttccctctcctccctctaagcggcttttggtttccttttgcccttgccgacagctccaccactctctgaaatgatcccgaaatttcccttggcgaactcatccttcatccaaatctcgcattcctcaaccgaactcgtcggatgatcaaatccccaagacacaaccttgtccaatatcgtttttatcatcggtccacccggcaggccaagagaagactggatggcgttcccgtccatcatcggcttggactcgattgccgcgggaagttccaatcggacaacgtcatccgtgaatctgttgaacctttcgaccacttctttagcttcctctggaggtcatatgtgtattgggtaaataagtgagtccgtttgtgttttcagagagggtcgcaacaaccagagtagaagccttttagcatctagttcgttgatgtgagacattttcacacacacatgtatcagaaagataggatcatgacactcacgtcggaaggcgtttgtctctatttggtatagcggtacgagctccatcagcatactccagaacacagagacatcccatgtggtgctcttagacgggtcatgcacataaggcatccgaaggacgttccctttattttgattttaaaaaggataattttcatgttgagtgaaagaacaaaaaaacagggttgtatccacagactgaccgatagtcgacctgcgtctcgggtcagaagcgtcccctgtagagatagcatggattggacgctcggactgatataacttagatacaaactgtgcttctgctccacttagctgtttgtatatatcaagattgtcagatttcgaaaagccaccttcagtttgagattcccttgttaaaacatccctacgcaccttgatagcctccttgatcaacatctctggcgcgctttgctcagtcttcttcaccttgactcgaacatttttccaaggcgctgtgcaagctgccaaaaacaacttttttctgatgtcatcctggttgatatgagcaaacagagccttggccgggactggaagctcctctccagattctaaccgggccggttggggcaaaggtgatgacgacagaaagtgagagaggacatagccggcaaccaatgcggtcgaccgaggtccgggcgaagcagtctgggttgaggcgagaacaggtgggagtacaaagattgagtcgtacagatcaagagaatcgatcagactaaatgcgtagagcgcattcttgtctgcagtatcacaattcaggattctcatcagctcggtcgaagcatttttccagagttatggaacacaataaaagaggtagaagaaacgcgagattgaaacgaacgtccaaacatcttctcaatctctatcccgacacgttctctactgatccgttctctgagtcctttcttgagcgcatcatccttgcatgcctctcgaatgtcatccgtgagctcaaagttataccgactggcaaacctcacgcatctgatcaacctcaacggatcgtcctcaaaggtcttgtgcgcctcgattggagttcggatcaaaccatgctcaagatcggtcaaaccctataagagatgagtgttaaaaaagaggaagagaaaggaagaaaacgctccgtctgggtcaaacacgctcgctcagatgtaaaggctctgcatagacgaaccatctgcgtgtgatcttcgacagctcgagtgtgcacgttgtaaaacagagagttgatggtgatgtctcggcggagcgcatcatctagaggtgtcccaaatttctgacggcgtcgttcgccaacaaaagcgcgaacatcttatgagcgttcatgaagagagggccatcaggttcaagaagagtgctggcctgcctgcctacctaccatttcactagggatcctgctgccatccgtgtattcttcgtttctcaaattcacgaagtccagatcgagacccatgataacctgcttggcagtctcgagatgtttgctctgttccggattagactcgatctttgcgacggacgtccggggaatctctggatgatgattcgagagaaatgaagaaaaggcaatagcgaatgggtgaccggtatggttggagagtgcgagatcgatgtcatcacatggtagagagaggagctgagtgaattaaccagatatacacatcaatcactgccaacgaaccgtcagatacctttcataagtgggttgaaagaaacgaaccttgtcccggacccagcctcctgcaattctgcattctacttgaggacctgacggttctgtctttgcgataaactctctaaactcttccaacagaccacacagcttgtcttccgccggtgtgagctcaatctttctgttttgattgatcatctttcggttcgctttatcaaaaggtagaatgaacgtggagggcacggaggaggtgaacgtcttgatatgcggtctgatgatgtacggtgatggcctggttctgatataagggagtgtgttggctggcagtctcatccaaccgaaatgtgtcgagctggaaccagacagaagaaggtaaacaagagacgaagagtcaagctctgttgtagagaaggaagagtctctgagtgacgattgatgatgctgatgatgataggatttgaagaatttatggacagaaatccacaagaaaagactataaatctttgtagttcattctcctagtccatacaacgattttctatagcctccatcaggattctcaccttcactcggaactcctcgagaaaaccacaagcagacgacaattcccagatgtctttcttgaggacagggaatctaaacaaaatcatcaatcttgatcagttccctgttttcaccctcgctataggaatcactcttttggctgggttgcacatcatgttctcaattttgaaaccaaagtggaatgcaaagggcaaggtcagcctactcctcttattcctcatctccgttctatcaccagctcctcgctcacagcttattgtctcctgacatgcaaatacgttctctgatatgccatgttcatttgttgtgatgaaatgtagcattgtatcgtgaccggcaagtctcatcttgataacaacccgctgttgcattaacactcagatttcctgatctaatctctgtaacgttcccaacaggtggttcctctgggctgggattcgagctagcggctcttctcttgcaaaggggggcggatgtcaccataattgccagaaaccagcaacgcctagatgaagcgattgagaagctcaaggttggatcacctcctcagattgtgtcttccaggggttgtatcaacagataatacataggaaagagctgaaagaatgattgttttgactgtttgaatcaaccctagcctgtctcgtcatcctctcaatcacatctccacgccatctcgggcgacttgtcttcttctactggtgcccgggaagctttggagcaagccataaaatatcatccagaaaataaggcagatgccgtattcatgtgcgccggtgtatgtcgcttttctgtctggcgtttcacagccgtgtccaaaccaaactgaactcttgtgattcatccctcgcataggcttcctacccaggcttcttcctctctcaaccggattctgactttacttcaacgatcgaccagtcttactataccgcgctctggacatccagagctgctgctcaactaatcgcccgtcagatcctgtcaccctccacttccaaagctggaccgccttcatcaccacccaagcttgtctttgtagcttctaccctgtccttcttgtcctttgctggctattcatcctattcacccgcaaaatatgcgcttcgtggtctctcggacgcgcttcgaaatgagcttcagctcgtcggaattgacgttcactgcttcttccccgctgggatcattactcccggatttgagaaagaaaacaccacaaagccgcaactctgcaggattatagaaggaagcgacgagccgctcatgccagccaaggttgcttctcatctctataaaggtttgtctctcggctgtagctgctcttgtctctcacttattattgtcctcgctgtttgtagcctggaagtttctttgggttatgtacatccactttcttcatcgcagaatagagctgactgacatattgttcattcgggaacgatgaattggatttaggtctcgaaaagggacagtttcatatatcgtacgatatcgcgactgagattttccgatcatctgccggtggattagctccatctaatggagttgtccttgataccttgctatcgttcatcggtcgtgtacgttccttcttctttctttcgatcgtttgaagcaaagccgatctgactcttggtatgtgtttgtgtatatgcgtttgttatcgtggtaagatcggaatcccaatctggagaatatgggctgacaaacaggtcagagattatcgggcagagtatcttcaaaagctacaagccgatggattcttcaactagacatgctcggaccgtttattcgttcggtttcttcatattcatctgatcgaattattcttttttctcttcgtgttcaatctctaactctgaaatgcttcatggaaccagataccacttttgcttatgacagttcaggcgaatgaatgagatgactatctgactgtctcaaacgatttgagatcaatgaaaatctcctatgttgaccatccaaaatactgttacaacagatgttacatcgcaaacgaagcagcccgcggagagcgatggttaaaggcagagaagagaatcaggaagaagataagagtgaagagaaggattaaaaaaagaaaaaggttctattcccttcgccgagctttttccaccccaagacctcttatgtccgcgtaaggtttatatagctcgtcgttgtggattcgtactctgccgcaaagatccttcgttgctctctaatcatccacctacgatttgttcaggcaggtttgaaggccaagtttaaaaaagacagagagatgatgagctatatccttcctctctttgagcgaagagacggtagaccacaagaagatgactaacttcataaaatcttgaatttgatctcggagaatgttgacggactcggcatccatgttgctccccgcgagataacttggcaaatttacttcaacaatattcgacacgataaaagagaagtgagacaacgaacgaaaaaaaaactcataaagtggatgctagacgcatagaaagagattagaaaagtgagaccgaccgaaaagtctcagcaaatgctccgcgccataaatcttactcggctcgaactcttcgccagtagtgacctgacctttggaaatcgcataatggtctcttcgctgggatagatattgctgtctttcgaaccggtacagcaggtttgctccaagtgacttgtcaaaatatagctgaaggccagacaagacttcagtcagaattgctattgatcgactgattggacat

SEQ ID NO: 3119 - DNA, 2434 bp, Xanthophyllomyces dendrorhous
attcaagagtcgtatgaaagccgtttcatgttgaggtgctagcaaatgtcagtacactttgaaacacaagcaggtcaacaagaaggaaagacgaacggaatatcaaccttcctggaggctgtggcggcttcgagtgcagcaagcgcgtaattcctgtattcttggatcagctcggctacattgggcgtttttggcaacggaacaatctggcgagaagcacactcagacaaattcagtactctctttcattcttgcaaaagatagaaagaaggaacgattcgagatagggagaggatgcttggaacggacctgattgttcttcgtgacattttcccaatcatccaccagctgaaccttcagcggttcaggtatcggaattttgatgtccagtcgtttcgcaggttctccctcctaaaagatacagtctcgaatgaatcaacagagaagaaagactgtgattgggaaacaaagacagagaagactgaccacgtctccatctctggctctttttcgtcctactccagcagctccctctgacttccttcctcccttctgaggccctgttgttgagcctcctaaactcgctctgcctgtgggtgctgctgtaacgactggtggtggaggagctgccgtcgctttagctttgtcgattaattctttctgcttagcgagcccagcttggtcaaacttaatgagcctcgaagaaggcacattctcgtcccaactattgaaggatacgtgatgagcaagtgaaagatccatttgaggaggccaaggtcgaaaacatgcaagttagttgaactataaaatctcggatagaggtaaaaccttgaatgaagacgaacctctgtttccaacccttgtaatgcacgagatacagagggccgtgatcatctgcttgcttagccgaaggcttagtcttctcggtcaccttgaggatctgatagatcaagtattcgaatatgagtgcgatgttgggttttagatagatcacaaagagaaggacaaagatagacgcgcgagagaagataaagttgcggtgagctcttgactgaaagaggcgaaagtaaagaaggaacatactttagcctcatagagaagaggaccatgaaagcagaggacttgttctccctgtgagaacgtggtcgacatgaagccaaagaggaagaatagaagataactggtttgatgggtcgctcaaacgagggaagtatatggttgtttgaggtcgacaaaggaattggacgcgttcaaagtcttctcaatctacaccttggcctttgccgcttgtccatcatcaaccgtcaccatcatcatcgtcgccgaacgcttctgtactctaatcttgcctgcttatctttctgttcgctgatatctgtactacgagttgacaccaatgcctccaaaggtgcttgctccgttggcgccggcaaacctgcggtctgggctgaacaattactccaagcaaccagagacttcatccacatccccctcgactaacaagtctactattccggccaatactacgacctcaattacgaccacggcagctgcatttcaacctgtcaaaaattctatcgttgtttctgctagacaggtaagatgatcgtgcatttatgtaatgaggtcattgctcgtgactgacatctatcttcatgtcttcagaggggaaatcccatcatcccacatatccggaacgtccagtgggagtacggggatgtcgtcccagattatgttgtcggtctccagactggtctactatacctctcgttagcttttctattttgattttaacccttcgctttctgacttagtagatctgcatacaaccacagagataagctcaaattcaaaaactgttttcttctaggttgagatatcatcgacttcacccagagtatcttcaccagcgaatagaaaagttaggaaacatgtacgcgttaagaattctactgatcatgtgtgatgtagtgagtttcctctctgtaacttccgtcgtctgtccaaacgctaactaatacatcgagtggggcttgtttgctgtgtgtcaatctggcgcggtcgtaatctagaatgatcatcaggatcctatcagagagatcaccaagatttgcataatcaataacttaactgttgtgattgcctggacgtatgtctatcttcactctctcccttaagcctcgttatgactcaggcctgctcaactgaatcctcaatcatccaatctgcttcggtcaaatcttgaccagtccggaggaagcaggacagtatatcgcaacttataagctgtacgagaccaagccaccgacaatccttcaggagagaacgtccaaggattatgcctctcatctaaacaaggcgctcactgccgtcagaggtgtcaatcggacggatgtcttgacattgagcagtagctttggggtttgttcttctc

SEQ ID NO: 3120 - DNA, 10381 bp, Xanthophyllomyces dendrorhous
tgacggaatgcacaagtgaatgactaacaagagacctctgtatccattcttgtcctcatcgatcatccgacatctatcatgtttgtctactactctgagaacaggctttctcaaaaatggtccatgccagtcgcgaagaaatttcgctgtgccctgggttaggagacgtgaaagttcgccgattggtcgaggcctttaccgctccactcagaggatcgtccataaacaagcgaaagggagtcgatcagccggtagatctccaaggaacacgtcagaaacgtagagagaccgatagtggcgagtctaatctgaaagataacggggaatcaaccaaggtaggacaaaatgaagttgaagaggagactgaaagggatccttcgcctgattggccgtctgaagatggacaagacccagagttggaagatgcagaatcaacacgttcaacgtcctggtccgcctcgcctccattgagtaataaaccggaggactctgcgttgacttctcgggcagaatccccagattggccggacgatgaggaggtagaaatactgaaggacgtgctagctaaagggcccttatagagctagtcgagttcaggtctcttgcctttcttgattggaaggtcttactgtagcaaatcttgtaccagtccgttcattttcttcgtatcttccttcttcttcttctccttttatcaaaagactctgattcatactaacatgtgatgatggttttggtttcacttgaagtacagccatataacgatgtatcacccagataattatcgcttggttatgagcttcaacccgtataagatgttgaaagaattgcccttagaatcagaagtgaacaagaaaaatcccataatatgtagtagataaccttcctctcttccttcttcagctgtttcatctcgcgatcgagggccttccttctgtgccaagatctgactagaagaaatcaccgttgtgcgtactttacgcctttttaaagttgttgagcttggaggtcgtgttcttaggaagctccctgtttcgtccaaagaaaatgatgaggatgatcagcaccaggttaacaggggttgcttgatcacgatggcctagaaacaaccgcttacttgacccaaggcaagaagtctcgaccctgcatatacggtcggaggacttcaggaattcgaagaccctatgtatatcaagtcaaaagaaacaagagaaaagaagtttgtcaaaactaaagagacctgctggaagtcaagcgagtggggcgtacatcgggagtctggtagttctcaaccacacagcctgtttgagaagaagcaaacgaggagaagtgagtctcaactcttggtggacatacgaagagagggaaacgtacagagagctcgctcagtagcacagagagttccgttgagcatgtggacgtagttcttcttggtctctcccttgaccttgacaccacaccgaacttctaatgatcgagactctgtagatcacgaaacaggttggcggagccaatcgttggttagtctcaccggtacgtgttgatacacaagtttgatgaaggaaggatggtgaacacacggtaatcggctaagaacaagaagaaagggatgctttaggtcagactactatagcggagattcatgaaaacacatgactgaattaacgtactgcagtttgagatagactggagctccttgtaagctccctggaatgggaaccaagcctcgacatcgtacttaatcgccgcagcgttgttcaacgcaccggagacaataccgaccactcggtacggcaagccgagagactggtagaactcttccgagttggcaaccatgtgctcaaacatctccatcgacttttcgggctcggtgatacagaactagatgataggagtcattgattggatagttgtcaggagggccaagcagaatgaattgggcggtcggaaactagaggaactgacctgctcgatcttctcaaactggtggactcggaagattccccagacatctcgaccgtgggaaccggcctcctttcggaagcaggtagagtagccagcgaacctggtagagagcaaaaggagtttcaaagatttcagtaagggaacatctaactgcgccgtgctaaactctccctttaaccgggcgctcatcagagcgcaggatagaggagtcagagaagggaccgaacgtacttgagaggaagatcggttttggggttctcgaaccattcgtccatatacatacccgacagaggctgctcggaggtggcaatgaggtacttgtcctcttctccgtccataacctaagacaagccgcagaaacagagcgttaattcaagttcaatatacatcactacattcgataatgcatatcaatggtcgaagcacaccttgtaaagctcctcatcgaactgatcgctagatatccagagataagcaaacggaccatgatatcagctttggtcctaacagacagaccaaagatcgagcaagatgtcatatattccttgacagcgattggttccacttacagctgggcagtcttggacatgacgtctcgcttcataatgtaaggagtctggacctttttgtattccttctttcgaaggaaatcaagtccgtagttgattaaagcctggttgaggtcgactccatctccagtaaggaagaaccctcggtgaccagagatcttggcacctgggaggaaacgaaacgtttaagtttgtcttggtgagtggtatggaaacgggtcaacgctcattttagattataggttcttacctcgctcgagatcgaaagcatcaattcggtggaggacctcgtggtgagcgatgatgtcggttcggtgaacgggctgagcatcagggccgtcagggtgccactgtcggatgagggagttatcatcctacattacccgagtttccaagcgagataaatgtagaaggtgatatccatagagacgcagacacgagatatcagccaagcgagttacctgatagttccccctccttagatatgtttctacatatgttcaggcaagaatcgggagtctaatatgatcaaacctacctcagtcaaactgatagggcatccctcggcaacaatgttaccaatcgttccacaaagctttcgcatggttttctcagcctcaatagcagtctgcttgagctcggcgagctctttatcctgggaggtcttctgtgcgactaaatcatcagcgggttccttgttctagaagaagagaagaaaagggggaagagtttagaaaagaaagtaggtcagtacgaaaaggattgtgaaagggaagcacacttgagcccatcgaagggcggaacgagagaaatgaacgaactctcttcttcaatgagatttccttctggagagcattgatctccttggccttctgagcggcttgaaagttgactgatagaaatgaagcaacaaatatacagcgagcaagaagaagagcagggttcagaaagggaatgaaacaagataatatcataagcacaacctagcaagtgatctgatatgactctctttcgccttctgataggagaaaagaacgaaagagagaactaacgcttagtccagttggtatatctctcgagaacatcgtccacaagctcaaccgaggctcctctctttcgctgagactctcgaacgagctccgggtcaccgcccttgtctttctggactgtttttttcatagtaagaaagtgaagccccgagaatcagccaacaagtcccgacagtaacgtcaacaagacaaccactcacgaagaatgatatcaatcatttaggaaaaagtgggaaaaggaataaagaaaccaaaggagaaaaagtgtgtggttgctgagaagaagaaagtgagaaagatgtaaagaggattccatatgagcgtcttgcctgataaagtcacgtgacgtccagattctcagccctcgaacacctcaagcgttttctacgcaaagaacttcaaaaaatggaccatgatatgatgagaatagtgaaagcctgtcgtaaagtcgtattgagaagaggataatcgaagagaagaaggagataaactcggaaagagggtgagaggataaagtatatgttatccagaagggattctgttatctgaagctcgattggaacactaatgatcaaaaacttctagaagagtgacacatcggaggaagaccagaggatgggagaagaaaatactgcgacgagtcaaagaaaaggagggtcaaaaagcgggtatggccgaaagaaaaggtgagagcgaaaacagatgatgaatgatgcggaccaaaaacaggcagtgagtggaggacgagtgaatgaaaatggattataaactaccagaagaaggtggaggaagaaaaagagaagaaagatgcgagaggtgggggagctcaaggatagtgaagcccaaaaaagagagagagagaataaaggcgcatgttaaaactacaagagggtgcaagggtatgggcaatgacgagcggtcgagtggatgctggagatgaacggggaaggaggaatgcaatccaagaatagacaaggcgtggcgtaaaagaagaagttaagaagacaccgaagaggtgaccgaggtatgtcgtagcttgaattgacgtacgatgtaaaagaacgagggagggagggctgtgtgtaagatggacgcagttgacgactataaaatgaatatttagacaaaggaaatgacgaggtagcgacatcaagctcgaccggaaagaggatcaagtaaggtcgcttccagctcgatctgttgtgaatcaaggtctgccatacacacttcccagtcctcttgtgttctatttgtagcagaaaagagtgaagatgcgaacgagaatacttgttattgaacaagatcccaaaagaaaagagaagaaaagaagtatgtaagagggactaacttcaacagaacaaggtcttcatccaagtctcggtacttcatctgaagtcgtttgctgttatattcaggccgcccccgagcgactggaatcaaatttgtcacataaggcaaggaaagaagtcaacaaaccatgtacccaacaacaagagcaacagagaagagcagtgaggtgatttttttcgactaactctttttgaacactctcgtttttaagctctctatctcactatctacgggtacgttaatcatgagcacatcatcctcgaaatgaatccgcatcatcgttgtcggaccagtaagattcttcaaagatgtcatctgagtgtttgaatcctcgctacccatcctcaccggaatgtttcgcctgggcccgctgcttccaaaaggtgtcgccggggacgattgactttcgtctgagatcgaagtcgacgtactctctccgctcgctcgcttgtcgacttctcttcctgagttggccagagatgacttggacgagttcgtcggtcctatgactaattgttcaaccagcgcctcggtagatgagattgaggactcttggggtgtcattgtggtcgggggcgacgacgacggcatagggggatgagccaagtccttctgttgttgacgttgctgttgctgctgggcctgatacgccatggggctcgaagctgatcgatttcgataaggaaccaccggcctggacgggttcggcgccatcgactgaggatggtttcgatgttcgactaaacctgccgagttgggctgacgagaaagggcctgtacgccgtttcgaacaacagttggtccattgttgaaagttgatggtgggccggcgggtagatcttcggcatgatgacgacgggtgttggacaaagacatctgagtccgagagcttttggacagaccaccgcctgttccaccagtaggaattacattattccatgaaggatccggttgaatcgatgatgtgctcgaaggcatcgaaacgtttctaggaaaagaaggcattgcagggacgggctgttggtgcatttgcatttgtgattgcaactgctgctggagttgcatctgttgctgttccgtcctccagtcatggaccaagttacctcggaactcttctgttcgcgctcggcctcggcccgatagtgtctgtgtaacatcggatgaattgtccctagaggatgtggtcggccgacgagagcttccaatctgggattgagcttccgaccctctgcgcggtctgggcacgccggaaatgacggactccccatctgtttcccaacctccagcggagtgatcagtctcgtcatgatcgttgtggaccgaacggggggagaatgcatcggttgtgaaggatggagtggaccgatgatgcggctggaaggatgacccagcagattgctgactgtggtgggaatgatgattagcccggttggcggcggcctgcctaatcaaccggcgttcctgttgaatcagtcgtttgacctgactatcccacttccgaagcgattcgtcgttcttcatgtgaagtacaaacgaagcactcgtgtccggagcttcttgactacgccaatatacttggagacctagtccaccatccttcctggtgacaatctctgtgtgtgtcaagttgttacagtagattcgacctttaacgaaatactgcgaacgctcagcattcttgttaaatccattcgagccggtcttggatctcaacagtttctgaccctgtgaagatgaagtagagattgagtggaataaatatgagtacttgaagtccagggtacgaagagcaaatggatgaacaaacctttttgagcactttgtctcctccctatagatgatcacacatataaagaggaacatctgagggatcagtatcgatcgaacgaaccaaacactatcaaaagaagactcacatccttgcaacacagcaacatcttctcaaacaaaaacacatgatagtctctatcggatccgccttttgtagcgatgagatgttcgtcaatgacaagatctccaaacaagagcggatcgtgatctttccaatccgaaactcgtttcataagttcaatttttgtctcctcgttttctttggctcttcgggtttcgttcactttctcggtaatccgcttgacagcctcgacaccaagtagaagggactgatggtgaatattgtccgagggcgaagacgctttcaccaaggactgatcaagacaaagagagagcgcatgtgtagttttcaaaaagaagaataaggagaggaagtgagatcatgaaacatgtcagctgtccaagtctcaagagatgtggatcaattatgtacaaagagagaatgaaaaggaagaaggccaacgcaccgaaagcaacaaagggtacttcgtgatacgctggatcggtttaatcaagaacgcttgaacttccctcgttggttcgagaataagatccgaccgagacgacagctgtggcatgtgcgtctggaccatctcgagggcctccgtgtaatttgcgcagaacgggccgtaacattcgaattcgcgttcctattttgcaacgaagagagagtggttcagaggaaatacctccagtgaggtgatcagtatgagtcaaggtttaaatgttctgacgcgcgtatgaaaaacaatgagaatgagaattggattgggaaagcacgaacatgtttgatgaaaggtttaccccagtcgcccatgcgccagtttgaaccgtctgccttttcggcctctgtttcgagagaaatctgaaactttcgctgaaagtcgagcaagacgtgcaggttagagaatatatggtgtgccgtgtcgagcgagatcatatcgtttgccaggagagattcggaatattgctatttcgtcgatttcgtagtgcgttttgttagctggggtaccatgatggaaagaggagcataaatagagcaaaagaaaaaagacagaacgaacgtgcaagacttccagctcttggacgtattttctctctgtctcgaccagttctttgaccaagttttcagcttcgcctatgctcaacggactgcttcccaactgactggccgatcccatccctcccatcagggctgctcctcccggggtgatcgctccaggaatggcatggatgccagtgaagaatccattagaggcactcccaggcgtattgggatacagcggtttgggtcccagagagtcaaacgcgttgtagcctgtggaagcacctggagtcgggatgggggtctgactggacgactggtagccgaacggattggatgacccgacgtcgtttacaggggaaaacgattcgtcggtgggcgattgagtagcgggtagtttgtcgagcaacagtgtggcggtgtgaaggatctttgtttttgaaaggataagagatgtcagcaagttatgtgaaggatatgacgatctggagagaagagagaaagatatgcaaaacaggaggagaacgactaactttgacgaatgaatttgtatttggtttgtacagatcggtgatactccataattcatcgtttggccaacctccgacatccttaagctgcatcaagaacgagagggtcttgtaaagaggcttctggcaaagtaatttcttctttgggtcgcctaaacgagagaagaaaatgatacacaagatgatcaagatgggaaataaggaagacgaaggtcagtcgaataaatcggccaagtagagaaccacataaactcacccatttggacaaccatccaattcaatgctttttcaccagcggccatgtcccacttgatatcttcgccctcgatgtttacccaatgtgagctaccgtcagccctcatctttttcagactatctgcccaaacgccggtctggccgactctgttgactagaaagacaaaggaagagcctgtccggagagaccaccagacatgttcgactacagttgggttgatctcgccttctgaaaacccaaggtcgggcgagggattgtagtcaaggtagggactgaagcctctgagggtgatcaagcgatgtttgatgtgcctggcgatttgaaagatagaagtgttgccgttctgaatgttggccgagagctgtgccgtcttgagggccagagtgtttggttggttcggaggcagagaaatctggatatggccggggtgagaggatgaggagccagtgggagagagggcggttggttgtatggaaagctgagccgagcttcggctggcgatgctctgcccgtaaggggatgatttcggatcctcgattgtggtagatgacgaggatgcggtcgaaccaggtgtccagggatgatatatgaggttggacgaggacgaggccattggtaagacagagagagaaagggtgtaggaacagaaaagggtggtaccgaaggaaacgggggaaaggctggagaatgaacaagggaaggaactaagggctgatgaggagagagtataaggaagctgatctaatggaaggatgtcgagaaatgctgtttgtccaggtaaaaaaattcacgagacatgcagtcgggactgggaggtgttcagagacagggatagaatgagcgagggacaccgaggcaagagagacgagaggggcgatggatggggttgctgaaggtcgtgtgaaaagaggaggcgcgcgtgtgtttgggacgttcgcacctgtagaacggacgtgtcgttcttctttcctttctgttcttttctttttctctacgatcaaatggcctggacgaagaagaaaggtctgagccagaagtatgaccgatcgatatgatgaccgggtgagatatctggagaaacaactcgatgtgaggatagactcggcaaagacaagaacgaaacgcaacgaggctggatgatgggtgtgtgaagaaacaaaagcggctgatgagaacaccgggaaagatgattagagaacgaagacgagacgaccgacgtcgttccttgatcacaaattctggtcaagaagggcagacttccagcgtcgagcacttgcaacaccaaccgaggagcggacgagacgagtgagagagggtcaaaagaatgggcgagcgagaaggtgaaggtggcagaggaggagtgaatacgatacaaacaggaacacaagaacaagggcgccagatcaattacgtaagctagaataaccatgagccctgtgccctgtgccctgagccctgaggcccgtgcgctgtgcgttgaaaacgacccagacagtcacaccatcattcgatgggacgactaggagcatggtgagaaagtacgatgagacggaacatggagaaagacggcatcgtgggatgcatatacacatcgcaagagtctgtgtgtgcacttcaacatgaatcctatttacatgatcctcggtcgacagttagagatataaatagttcgagtttgtcggacaactaggggttctctctttcccatcatctccatctttgccttc

SEQ ID NO: 3121 - DNA, 2359 bp, Xanthophyllomyces dendrorhous
atacatcatcaataatactctccatcactatgtcgtctttccaaatccccaaaacaatgagagccgtcctggtaggcttcttcttcttcttctttttctattcctctatctgcttcccgtcctgggtcgttcttactcttgttttctacatcatactgatcctatcattgaccgtacagatccgcaagaccggaggtcctgaagccattgagactcaggatgattacccagtgcccactttggccgaggatcaagttctcatcaagattagttacgcaggcgtcaacttgtgggtatctctcaatcatgaagtgacatcctcgttttcgtctttctcttccttgatcacacacccggcccggcccagctgactcatctgatgttctgcatatgcacatatatatgacctccagcattgacacctacaaacggtctgggctataccaatcaaagtacccgctcatcctcggagaggaaggcgcagggacaatcgtcgacattcatccctcagtgaacagttcagacatcaagctcggtagacgggttgcgttcatttcgaccggatcttacgccgaatatatcgcaatctcacacaagaaattagctgtatgttgccactcgcggattgcgtcctatgtttttaatttatccgtttttccttactaatcttctgacccttaaccaatcaacagtaccttccagaccatgtatctttcaaggatgccgccggagtcctgctccagggattaaccggtcagtagatccctatcggatgctcccccggcctaatcatttgccctcctcatttctgatccctccataccctccttcaattctataaagctttgaccatgcttcaagaatcctatgctgttaaatctggcgattggatcctggtccatgccgctgctggtggagttggtctcaatttgtgccaggtctgtccaatcaatttggttttcatcaatgttcgacccgctttctcttctttttaaactcattttgatcgtcgttcttttcgtttctttcccatctcgatcttagattgcatcttatctgggagtgaatgtcatcggaacgacgtcgacattggacaaagccgagctcgctagaaagaatggcgcagagactgtggtcgtcaatggcagcgcagaagatctcaaagccgaagttgataaaaataccgacggaaaaggtgttcatggtgagtatctccaatgagttatcgagtaatcttttccatcaagctctttacgtgcgcaaacggacactgacaattctatacatttcagctgtttttgacggtgtcggaaaagcgacttgggaaggaaatttccccttgttatctcggaaaggaacgatcgtctcttgcaagtccctcactctctcttcacataaaatgttgatcccaagaacgccactaatgttatctttcttgtgtctcctctctccttccttgcttcttcctatcagtcggaaacgcatccggtccccctcctgaaatctcgcctttgattttgggtaaaggaaattggaaacttactcgtccggtgtaagcttggtccagatttgatctaggcataactagacaaacgtaaaacaatcacgaatctgatatccgacaggagttttcttttcttttcttttgctttgcggatctctctgcatacaggttgaacaatgcgatccatactcctgaagagtttgaatactacacttcagagctcttcaagttggtagaccaaaaagtcgtcaatgtacgtcccgttcaatcctatatgataacacacgcatacagctaaaccaaggaatcttctggcctcttggttgattgacagctccttgttaacggcacatatcccctctctgctgaaggacttcggcaagctcatgcggatcttacaggaaggaagaccgtcggaaaactcgttattcaggtcgccgacgaatgagtttcgtctcgtcttgtgtagtttcgttcccgcttggtgatagtaatgagatacggtttgttctagttggttgtatgtataacctgtttcgatgtacaatgtgcaaggttccccaatatgagtaagaggctctctgtaggaacctgaagaaaaaagctaagtatacaaaagagggaaactcatgacataaaacccagaaggtttgtaagcaagtaatgcaaaagataggggagagaagagatcgataagtgagatgcaagaatatcagtctttctttaagataaggagaagggcaggaacgattcgtttgaagagaaaagatgatcaataggagaagtgaagtaggttgatcgatcagtcgatcgaggagaaatgcatgacaagtatttgacgagggaatgattgat

SEQ ID NO: 3122 - DNA, 7998 bp, Xanthophyllomyces dendrorhous
tttgactcgaggttccgatccttccagaatctgaacaaactggccatctttgctgtaagggagagatacttttcagaaatcaagtcgatgcgacagaaaggaaagtgaaggtaactaactacatcagcagcccgctgatagcatcaattgcattgtttctccggcaaacctctatgatgtctgccatatcagctttcgacaaggctggcgatactgacgacgagcaaaacacaagctggaagatatccgactcatcaacttctcccaagggttcatgttcatctatttctccattggggtcgaatgaagaaaaatctaattccagggcgtcttcgctgtcgtttgagttgccgtcgaacgtcgagaaaaatgttacagtagaatctgtcgaggctgttgagagtgttctaactagatgtggcacatctaggctaagagaagaagagccgtccatagtcgaggaaagaggcgagagggctgatgggggatggttaggatgagataactaatcttccttcgaattgtacaaattcattgttacaagcacatcttgaaaatcccatgttatcacttctttgataaacattcattccccttccctcgttcagcaggcttccagcaaacgaacaacggacatatgttgaaagtacagcagtcactgaaagaaaatataaccaaaagaaaaccacatagaaatgaagaaaacagaattcaagacagtacaggcacatagagaacaaacacaacaagggaacataatttatattgataggatgggggacgcaacaggacattatcagaagggcataaatctaggtcaagtgtagaggaagacattgcgatagacagactagaaaaacatttagagctttataatggttgcgtggaccacgtcaatctttcatttctagagctgacctcagtaaactgaagatcccacgcgttcgattccaaccgaaagtcatttgtctgattacttcttacgtggccatacaaggatccttgaggtgaaccccctccgtttgagtagccagctgcgtaaacaaacgccggatcaatcagccgtacgctcggaggtgttatccgcaaacaacctacagatccggacgagattaaattaggcattgcaacagatatattctgagagctctcttggaaagagcacgttgtagacgggaaagtccctagagcattcgccaagctcgacacaaatcctgattggtgagaagtgatatcaccttccgatggggtttggaacggaatattcctaagctgattgaatccacaagcggccgcaaattgagaaggactcgattgataaccgtcagcgtacgcgccagacggagtggtgacgaatgagaaggtttcataatcgtagcccgctgggaccggaagatctacgtatcctaactgatcttgactcggttgcgataagtatttataagcattttgaaggatagaaccgggcgaaggcacaagtcgaccagagtacaacttgaaactatcgcgtgtcgtatccgacacagacgcacaaagggtttcgtcctcggtcagattgtgaaaaggagaaggggcagtcggagatgacctgcgtttgtaaccatgtctgcgctctcctggatagaaagacttgtacacgaatgactctagtgaggtgcactcgctcgagatcgattcatccgagtttgaagaatgagttccgaacggatatgacgagtccgtatcttctgtcgattcagattgctcatagaccgcctgattgggcaatggaaaatgatttggctcggacggcaagagaaatcccgttatcgaaggaagtggtgcgccgttagccgaaaacagcggaaagtaggacgacttggcgtggcgtgacggaggattctgagaaagaccgaatatgggatcagagagcgaaggaagaacttcgtccgacttgccgtatacgttgccaacggaagagcgcgatcgtcttgttgaacctcggcttgaggagagcgaaccagaaggcgtcgaatcagagttggtcatggatgatggagcggatgggcttggacttggcgtctcgaccgtcgagaacgagtctcgtttgtcagaattcttggcgacaaggtggggtgacgttctacaagaaccgtcgtacgctttccgagacccaccagcccgttttggtgttttcgatgtacattttgagaccccccgagtgagggtcttgcgatgggtcttgaagggaggctcttcgccgatccggacacccttctcaaactgatcagattcgttggctgggacataaacacatttccggttggcccggatacaattggcacaaatctataagacatgatctgagtatgaatacaacactggccatggtcgcaaaaaacctataaagcaatcatgaaggcttacatcagacccacagcaccttatcttccgatatcggcagtatgcgcacgcgattccgatctatgacaaaatgggaggaacttatgtcagaaagcagacatgatgagtttgacctgatgtaaggcttgacctactcgtcgacgggtggaaaccttggaaggcatgcttatggatgcagaagtacaaggtggcgccttgaaaataagttctaagtagggtggtctattgttatttaagaccgaccattgtaagaacaagtgccttccgcatgtattgtgaaggtgaaagacatactgacatgaaacttgtctcgatgttgttaggttgaatcggatatgaattgattaatgctactcaaggttcgaggtgagctatgcaaattgatacagaagtggatatatacagagggacagatacagggtggacagggaatgggttgatacaatactttgaatatacgaaggaaggccagtaagaatgatggtgggggtcaggatggattaacaacgaaaaaaacaatggctagagaaggacaagcgacgagaaagtaaacacgaacaagggcaagggaaacctccatggatgtgaatctcaggaacgatgacgaccaccgatgatgttaaggatagttatacaggtagcccttgtatttgatcagcggagtcatgagagaatagacatcgtgatactcaaaagaaggggagagaactcgggcaagtcactcctttgatgtcgaggaaacccttcaattctatcattctaaatctattgatgataacagtcgaaccaagcggtcaagggaagaaagaatcaacagtaagctgaaagatcttcagagtagacaaccacccttgttccatacgcgcgattgtatttgcatcgtatagtgcgcgtcgagcactttcaggaacgcgtcttacaaggaacacttatcaagaaccttctctcacttttcatgctcacgaccagcaaacactcaccaggagcaatctttccatccgaatagtttatatgaccctgtcttccatatgagtattcaggaagagcatcattattctgagctcctggctcagagaatattcctttgaaaggaatcgaggaaagaatcttgaacggcataaacccagatatattgacatctggagaaactcccttgatcggcaaataaagatgggtggtgtactacgtcgttccatctagatgtcagcaaccaaatgtgtaactaagactgtgtgagatggtacatacagaacaagtcaattttccctcaattccactatcaaaactaggtataagaggattgtccccagttttcatctcgcctactaccacgatctctgctttcattcttctctcgatcattttgttgggttctacatgatctgtttcttctgttggacagtaccagattcgagcctcattcttgatatcaaggatatcttcatgaatggtctggcggacggcctgtctcatacccttggccgtggtagtgatgacgcggaccagactcagtttaagactggaaggtgatggtcgatatgactgagaaggagattgagtccgatcagtgatcggcggagacaacgtcgtgatagataagtagtatgggattttctctttgacgactgcggctagtggctccggagttgtaagctttcataggaggaaaaaaagttaaaaagacttaaacaccgaatctttggcaagtacatggactctgtatcggaaatagagacgaacagcgacttgcacgaagcggatttttccaaagatcgttgagcgaaagtccttctcgattcgcgtagtgtgccacccctcgctttcagatggacaaggaggaggaagtataggtaaggtctgttggtcactttccattggagggtagatgggaggaggcattggttcataaggagcccagcaaggaggactgagatacagcaagcaaaacatgagaaagaaaagtaaaattcggatcagttcgctcttccgtagagcatttctcaggtcaaatcaaggtcgcgctcagatcgaatgatgaccaacgcataggtgaatggtatagagacgcgctcatttatggcgaacgatgagggtcgacggccaattacatcaatcgtatctacaccatatgaccatcgaaagaagaaccacaggctcagatatcatcgctgcaagtatgtggaaagtacgcgagatgtagcttacacacagaagaaccgacgtcagttcccgtcggtttccctctacctgttggaccagcttctgagcgagttccagcttcaaatgacggtggaaggcttggcaacaacggaaagtgaaacacgaatggaatctccatccccttggatgcgcttggcaagaaatcagacgatggttggtataaattgatctcatcgcaatagatcacgctcgtctcgcttgccaattctaaagatgagtcaatcaaagccagatattggtttcgaatctgaagaactataatggctggagtagacctgatgaaaggaaagggtagatcccatgggctcaccatttccacccaaagggaaagctgaaactgaagtgttgaagtttcgatatgtcgaatacttatcaatcataacaaaatcgggaatagcaaggtcttaaaattactgtcatcccgtatcgatgatatgcccggtaaaacaaagcaaggcttacctgagtacaccgaagctgaactacgatctggctgatattcctcttgcttaaatctgtaggatcaaacagaactagacctgagagatcgtccccagccgtatagacctgatcagaatcgaattggacggagagcaggtggtgattttgcagtttggatttaagacgcgacaacatcgatcaaacctggctagtgaacggtttcactcggtttcgtacagagacagaattgttgttcacggatagcttttacctttggatgatctggaagtggttaggatgtaggagtctttgctcgtcggacatattcaaatcgtcatgcatggcatgtctgggcttaatatatctttcggaccgatccttttccttatgtatctcatcttcgggcccagagttgatcaagagcagacgttcaaaacggatggacatttgatagcaagaaagtagaaagtttatgcaaatgatatgatgcaagatgggcaacatcggttgaaacagacactgtacgaaaaatgtcctttctgccggttgtttgctcgtcatcttttgtacaagtgatccccctcgatcgctccttgagcaaccttcaaagataagagagaggaggcagacgtcgtcaagccaaagtagaaagggttggaagtgtcgagaaaatgccactcggaggcttgctaatggggaaaaatgtaagcattgaggggggttgtcgaggggaccggaaggatgtatgggaaacttgacgtcatacagctacagtgtggatgaagatgcaagagaaacagaaacagaaacagaaagaaagcagtcatgcaaacctcaagtatgatcttgcacaattagagcggcttaagacaacgacagcagaagtgtcgatgccctctgggccacatccgcgaatgtcagcgatctcgtactcgactctcgcgctgctcggaccactactcggaccttctcggctgacacaatcggcccaaatcgatcaagtaggaaagctgcgatctcgtcgtctagaagaaaagcccccagaggtacgagagaaaaggcatcggtcgaagaaagaaagaagaacagtggagaatgagaaaagcagactcaagctgcctaatggatgaagcctaattttttccatagggagactcgtccgactaggagacggcggaggaatagatatgattatagaactcgagaggacggacctgttggctcaatatccttccaatgcgtaaactggcaggttacgtccgaacagcttccaccttgtagttcccactgacaaagcgctcgagatgggtcaagatgtcttttcgaaagacaggatgttcgtagagcagggacaattgactctgactgattctgcgtaggctgagagcgcgttggcatcaagagaggaaagaaagctaaaggcgacgtatacgtctgtatatagaacagtaaagaaagatcaagggacgaattctttacatcagtaatggagaaaagagcagaagcttactacagaagggtaatcaggatttacgcgcgatgtcggtatctcggttatatgctttgaagtagttgatcgaatctagaatttgagtgtgtaagcacagggaaccaaatattttagaggagacgtccatcaacaccgaaagcatcttccaatcgtttacgctcaaccgagagagactgatctgggtcagacgcctaccttctcgttgttatcgttgttcactggtcctacatgatgtattcaaaggaaaaagaaatgaccatttcaaaaagaaatcagtcagttcgttcacctgtatcacgctcagtgcgcttcgatctagcgtcaccaatcaaaaagaatcattcgaaccacctggacctgcatcagagaaatccggaggtgagaatgtttgagcaacaggagaggtagtcttgaaaaaaattggatatacagcgagaagtgtagaaaggacatgctcacttatatctgacgtggacgttattgctgaaacaccgcgatttcaactttgctattcagatactgactcaagttaaaagaaaaatgtgcactgaccaactaaatccttgtctttctcctgcccgaattgctctgtggtctcgtcactatcgacatccattccacctttcaccttctccaaaagatctttcctctgctccaaagcttcttcgagtcttcctaccgctcctgtcattatttcgtccacctcgcccgccatattgctttctgccgtctcagaggattggtatgatctaagcatctcctgggcttgatctacaattgctactgttggtagagggacaggtgaagccctcgttgatgaggttccttcagacgtttcggtcgaaccagatctgatactgctgtcaatggatggaacgggtgccgctggctcaggttccaaagacgatttggcaagggaagaggaagacacactcggagccggtttagtcttctgtttcttctccataacggcgatcagctcgaccatgcgtctaatctcagactctttggcttctagcttagacttcgcttccatatctgcctcggctgtagacgcgccatttaacccaggtggtgaaggtgcggcagttgtggtcatcgagcctttcttgcttgtagttagtcgagctccgggaagaacaaaaggtgtcgtccctccgtcctcttcatcactagcctcacaatcggaaatatcgattacaaatctccaagcctgttcaggaacaagcggtttagatttgctgaacgggattccttcgacagatgtatgattcgagttggatgaatatccgaacgttgtgggtgctttatggtcaaaatcaagagcggagggccgcttatgagctgatgcagatcgtcgaggaaggataactagctgttttggaccgagcaaactacgggtggaagcgaggcgaggcgaagag

SEQ ID NO: 3123 - DNA, 10047 bp, Xanthophyllomyces dendrorhous
ttcgagaaacaggggacttgattggcagcggtggaggagggctgataggaggaggaggagggggggtgtcttgtgttttaagaggttttgcaatcacgcttgagtcgaaggttctaggcagaagtgctgcaccagcagcggaaggagggagactatgcgcagcatccaaggcaagagttggagatactacagcaaacttaggaggggagataggcgcatttgaattcgtcctcccctctgcatctgcatccgaggttttccttttctttttctttttggaggacttctctaaggagacatccgacttctcagaaacaggcaccacggcttccttagtaagaccaatctggttctcgacagctaccacaggggatacttcgtcggatataggtacagaagtagagggagcagcgttggtcatgactgtgtccagagtctggtcttgcatcgagattcgatcgaagagatccatacgagatttgaaagagtctgaaagtgtgattccatattagtggttgaaaatggcaacggctatggtcaaatattgaaaccacaagtatgttaagaaaacaaatctgaacagttgctgaccagttttctcagctgtatcgttcacttgactgagtttctcttgatttagattagtttttcttttctcagcagtaagaatcccagctggcggaaggtttgtgggtagtctaattttgagatccctgcagtacactagaagggccttgcgagagaatccttgggtcacaaagtactctggctccaccccccatgatagaagttcgatgagtaacgttcgagactctgcatattcttcctcagaaacttttcaatagaaagaggtaagaattagcgagcaaaaagagtgagaagaatcagctacgttcttagatagatttgagcaccgctcaccgcctggaggaaagatacgtactctgaagttcatctgctcctgccttgacgggatcaacctttctaggctcctcaatcatcctaggttggatcttgatcggaactttcgatcctttagccgtcttggtcttctttttcttaggaccaaccggcttattggtggcctccagtaaggcgggactaggtggtggaaaccttggttcgagcgccagcgtcgggggaggtgggagagggaatggtggtaacggtggaagtatgagaggattgtttgagcctaaagaaggggcattatgagggtaaattgttggtggaagtatcccaggtggacggatattaggagtatacagcgtaggggaggctggcttaggagacgcgagtggttcttcgtcctcagagatctctccatcctcacgatcagctccctcgtctccaaccttggacgaagcttggccggataccgagagcttagatcctgccctcaatactggttcgatcttggcagcaggcgtcgtaccttgttcaggggaagaagtcaaggacgaaccactagtaaggttcgcgacggtgttggaaacaacgggcggacgtgaagaggcttctacttcgtctaccttacgtttctttgtctgcaaagcaagcgacctgagagcggacacatccacaggtgtagacatgatgagcgttgtcagtcaagtacttcaaacccaggtgagagacgaggacaagcaacgggaggatgatggtatggggaatgagggcaacaatcgaattggtagggcgaactggggcaggagaaaaggaaggatgacttaattgaaccaagtatttgaattgtgaatttcatctataagtccaaggaaactccgtgtgagatttcagttgagatcgtcaacaatcaactcatcaaaatccatcagctcagtacagatcgctatggatcctcaggcaggtagctcaatctttgacgacgaggacgagagatctgtgagagtttgtttcgtttttttgcgcttggtcctcaagcgtttttgatattctgactgtcagactgcccaccaaaactgctatagcctttcagctcacctcaaactccagacccgtttccaaggatcgttcgcgaagctcctttgcctacggacggagaacccgttggattgtccactcgttcgtttatgaagcgatgagatgagctctacatagacgaaataaactgatcgtatcttaatcgtttctttgcagaggaaatcctggattggcaagctcagcagcgtcaagcccgtctgcagggtgaataccaaagaagcgcccggctcttgaatgatattgttcgtcttctttagatttataaagtaatcgagttatgataataacttttttctcaatctatctcacaggtttacgataaccttcagacgaatttaccccttgcctccctccgagttctcaatactcggcaaactaggtcaacctttctctcttctctactcaccccgcttcttacggcccgtcagccagcctcagaagatccaacattaggttccctactggaacttactcaagaagttaagcaagcactcgttccattcgggcttttcaaacgaatcgatgttcggttggagcaggctcagagtttgcttgctagggagggcgcagtcgatgttgtggtcgacgtggaagaagccggcagggtcactttgaagagtgggacagagtttggtcaggctgaaggaagcgctgtgagtcctgggctacattcatctgctcatgcatttcatccttgccggtctagagttcttccagtctgagctagaaactgtttcgattgtccaacagtatataacaggagacgtccgtaatgtctttggaggtgcagagactctctcagtgtcttcctctgtggggacgaaaactcgatcagcgtttgaagtgagcttctatgcctttttctctctctatatttgtcacagactcatcgaacgggatcctttctgactaccatctacacaggctagcttgaaaactccgctttttgcgtctcctcttcaaagtcttgtactctcggtcttttcattagaccgagacaacacttcctacgcttctcattgggagggtcttcagggtggtaaactaacttgggaggtaagcgtcttcttcgatcatcaagtgactgcaaccaatactgatcagttgtatcaaatgatcatcatttttcggcggcatcgtttagaaaaggaactttttcggtggtcattccatcacttatgaggccacccagcgcacactccaaaaccttttgcccaacgcttcactctcgttcgttatatcgccgtctatttactctttcctgccacaaggcttctcatactctctttcactcgttcaatcagtgttcgagaggctgctcggccagggccttctctcaaatcctccttgatgtatgcatacgcatctgacaccagagataaaaccttcctcggcacgaccggacgcctcttcaaggcctctcaggtgagatatctatagacacctcttctcagtccaaaatcttgaattgacctctgaccatgagaaccctaattcttttttccatactcgtttgataggaaatcgccgggttaggaggttctgcgtttttcctcaaatcgacgaccgagactacgttctcgcgggcaataggaaccgaagggctatttgcttccttttctgctcgggcaggagcggtcctaccgatgtttaaagatcgaccggtccatcttgccgatcgattgttggctggcggtccgaccggtgtgagaggtttcaagatgaatggaatgggtcctagggatggtggttcgttcattccacttttctttgactgatcccacattcgagaaaacttattcaatgtctcttacttccgcatggcactggactggatctctgtagaggactcactaggaggagacttgatgtactctattggggtttctctattcagtccattgcctatcaagccggaatggccattcaagcttcacgcgttcgccaacgccggaaagttgacttctctcggcggtttgtccctttcttttcctatctgcttcctttctcaaacccggaggccaatttacggatcaagcaccaacatattcttggtcaaacgagatgctcattctttcctctttctgttccttgatcagctacaccaaaagaatcgatcagtccactattcgctaccgctccatcggtctctgcaggcgtcgggttggtgtatgacttctcacccgtccggatcgaagcaaacttcacattacccttagtaggaagtcgaaaagaaggtcttagtaaaggatttagtttgggcatgggtatggatttcttataaaaagattgggcagctctgatgcatccttgattgtgacgtagaggaaatcagggatatgagaaggagtatcgggcaggaggaggagaaaaagaagaaggatatacaaatagcgatggtgaacgttgatgagattcaagagaacttttcgtgcgggagagaagaataggagtttgcacgtatcaacttctcgaagagagcaagcagagaaaagaaagaaagaaggagagacaaagagagagagagaagattgttcaagattgagaagagtgaggtaacactgggctagagatgtgaattacgattatagatttagaagaacatccagtatgacacaagtaggaggtgtctatttcgaagcggccgataaatcactgagcttgtctccaaactattatacgccaaacaggttctgaagatgctatctagatgtcaggcccggatcaggtcatattcgacgagaaggaaattgaacatctgaccaaagcgagatgagggtgcatgatgtgctgtacttacagttcgcttcgtgacatctgtcgttatatcaccagcagtggatggagaaccaagcgagccgtaccgattcgaacctgttcctgtggtaagtgcaggttccttcgtgagataatgagcagtgatggctccggcgatgacgaagagcatcacgaataccatcaaccagagaatcttgcccattcgggaatcttttgcctttttcgcttgtagccagccggcatccgattcgacagccgatgcgttgtgtgctatgatctggaaggaattcatagagtgaggatgtctgagaaaaggtgtctgatgtagaaggaccgcgtttttatcaaacaaacaaaaaaccttttaagcgagagtggactcaccgagaacctattccagaacacagactttctctctctcccggtatctcctcctccgatcatccctctagatacgccttcttctttttcatgtgcggtcgatccgactggggacctggtcggaccccaggcaagcgcaggactaggagctggggtagaaaatggggacacgaacggatttgtcgggctctcggtcggtaaggatggagaaggtgtctgtcgtccagaatcatcggctcccgcgtttgggtgataggccctttccggtgaagagattggagctagaggggtattcgcagaaagatatggactcctttttatgaaaaacgaacaagggggacaacttgcgtcaacgatcaaagtcaaggggatacattggtactttcgtgatctgctactcaccggccaggttgctgctgctgttgctgctgccatgactgtttttgttgctgttgctgctgttgttgttgttgtgcaaatgtcacacgatgatctccgccggtcgttgagagataagtagataacatttaagggaaaagagagtgattaagaataagtctttcggattgtgttgtgagatgtgagtgtgaagaaaagggatctcagcgaggaagagacaagagagaggtagtgagaggttgattgatataagtcaagaaggacccggtatcgagcgtgtcagtaagtttcttccaactgatgaggtccagacgaagtcaagaaggaccaagggccagggtgagtagattggttagcgcaaagagtgaataacgttaagagagaggaaccggactatccatcaggttctgtcctgaaaagagaaggtggttcttttgttgcgaatgtcaacagcaaagtttctgcaggcatgcaacaactagttagttgattagtctcaaacggtttctcaatacattcgtccattcgtgatcccaaacagaccaaaccgagattgagttggtatagatcggatgggacaagactgaactgaaccggattgtaaacatcatcggccgattagggccagggcattcaaggggaatgaaacgtggttacatgccggtcatgcaacatgtcgtaacaaggacaagattggggtcagaaaaccaacgttcgatatttttcggatgagtctgatttcaatttattgctggataaggccgagtatgaatttccattcctcttgcttattctcttattcgatcacccgaaaattaaacgaaacaaacgataaaaaggcccaagagattgagacaaagaactgggtcgagcccgttggctttagtttctttggcgtaggtcttgcgtcgatttccttcccgacggcctttttcttgtgtgtgtgttgtcttttgtacaatatatccctctatactctctcgcttctttcaagcttcatctaagcgcccgccgccgaggcttttctagactgggctctctgtcttggtccttcttccttttctctctactttctggttcatcatttttccatgcatcctcccataagttccgatcaaaggaagagaagaagacagacaaacaaatagatagataggaactaggatagaacggaagcatacgagaagggagagagcaaattgagaggaaaaggccttacacgcacgcaagcacacgcacacgcacacgcacagacagtcttgccgcctccgccttccagaaatggaccgaccaatccttcggctttgaagcggacatgaaacgtaagagagaagagacgcttggtattacagacccgagagagtgtaacatccaagcaatcgaatgtgctatctgttctattgtttcctctcctttgtagctcaccttttccctcacatccacgttgggcggcatatatagatgcgcactcgaacggtttctagctctgtccggatccagcgcttctttgagagtcttttgcagaggtagatgatgcatgaagacgaaaatcgagagaagtaagacgaaacatcgtgaggtcattgtgcttacaacttacactcccacggccggccgcatgacttcaggcgtgagctatcagccagagggggttgacacagagtccatggagagagagagacatacatatccagagaaaggccaattcgggtaatcgagagagagaagccgagcgattgaattggtcaactctagccgaatcgccgcggcacgaccgggagggaagataatcattgcgcagttccaaaaaaagcgacggaaaggaggtgaaattggaagcatcaaaaataaagttgattggggccccacttctggaaatttctccagcggccgacggcgtagacagacaaagttcagcgttacaggtggccgaccgcgagagcgacgacgcacgagagcgcgcaaaagaaaagagattaaaagaaaagaaaaaagaaaaaaaggcacactttccctatccggttcctggaaacccaaatacccacactctctatctcggcctctgccttgccgcccgtcaactctgacaaactcccagtggacacggcaaggaaaatctgtgtgaaaaaaagatacaaagatccccagtccttttagttggatctttcgtttcttttccttctctcgctttcattctttcttgacatccctccatccattctagtcctcgatccagtcttcgttttcatccctacttgtactccctttctcgacaaggcgtgtcgtaaagaagcgtcaaccccagtagctcttccctctcgctgacagtgtccccgttcgatctatcgatcgacagctccgttctctgcgacagacgggttcattctcatttccctaatcttaacatattcaaaagtcgttcaaagcgcatacatatcttccaccatggacgagaaaaaacatacacctgatgtcgttcctggtatgtaccctctgttgtttcttgtcggtcaaaaccgtcgactttaagcttggaaccagtttcttggcgttctttgttctcccttttctgtccctcttcttggtgccgttgagcgacatcccttttttgcgcaactcctagatccttattcgtccccttcttggctttttttcttctgttttgtttttccttcgctcccgtagacgacgctccgatcgaggagaagaagaagcgagagtacaaggatatggagcacaagagtgatggtgataagcacgctcttgtcgatctaaacactgttcgtcctcccgttttttcctccgttttcccttttcttcccattagtattagattttgccaactgaacagatctcactcatacgctttccattccatttagattcaattcaccgccgatgacctttacgacaaggataaggtcgatatcgagcacgtcgtgatggaggaggtcttccagctccttcagtgcgtaatccttatcgcttccgattatacagttttgatctgaggctttcgcttcatcatctgactccgttatcttaacttgcaacacagatgtgacgaaaacggtcttacctctgccgaggctgctcgacgaatcgagatctttggtcccaacaagctggccgagactaaagagaagtacgtttatcttctatttataaaagtccggaatccatacatcctgttatgcatacacgtatgcctaaacgacagtcgttgacctggtccacttctccccatatcacagtgccttcctccagttcctctctttcatgtggaaccccttgtcttgggtcatggaaggagccgcccttgtcgccatcgccctgtccaacggaggaggacgacctccggattggcaggatttcgtcggtattgttctgttgctcatcgtaagtttcatcttttcatcaaggccatctttaacgaagaaaccgagacactcacgttgtctcttacacagatcaactcgaccatcggtttcgtcgaggagaggaatgccggtaacgctgttaaagctctcatggattctctcgcccccaaggccaaggctaagcgagacggctcgtgggccgagattgaggttagtctctccgttactttatcagtggccacgatcacaaggctgatctatcgatactcgatcttccacagtcttccgagttggttcctggagatcttgtttcgttcaagcatggagatgtttgcccctctgattgccgattggtcgacgctgtggatgtttccatggatcaggccgccttgaccggagagtctcttcctgtcggaaagaacctcggtgatgagtgcttctctggatctacctgtaagcagggagaggccgagggtatcgtcatctccactggacccaacaccttcttcggtcgagctgccactcttgtcggagctgagaacgattccaccggtcacttgcaagccgtccttgccaagatcggactcttctgcatggtttccatcggtatctttgtcctcctcgagatccttatcctgtacgccgatttccgatactcttaccgagatggtctcgacaacatccttgtgctcttgatcggaggtatccccattgctatgcccaccgtgttgtccgttactatggccgttggagctcagcagcttgccaagcacaaggctatcgtcacccgaatcaccgctatcgaagagttggccggagttactatcctctgctcggacaagaccggaacgcttaccaccaacaagctcacgatcgatatgaacgaagtcaagacctacggacctttcaacgctgaggaggtcatgatgcttgccgcttacgcttctcgagtcgagaacatggacgccatcgatggatgtgtcgtcggatgcaacggaggacctgaggcttcccgaaagggtatggagcttttggactttattcctttcaaccctgttgacaagcgaactgccgctacttacgtcgagaccgccactggaaacat

SEQ ID NO: 3124 - DNA, 12649 bp, Xanthophyllomyces dendrorhous
gagaaagacgtcgaggagttcgcccgacgaggtctccgagctcttgccgtcgcccacgaggatgttcttgacaactcccgagagaagggtgctcccggaaacggattcgagcttattggactccttgctatcttcgatccccctcgagacgacaccaagcagaccatcgatgacgctcaggctcttggtgttaaggtgaagatggttaccggtgatcagctcgctatcgctaaggagaccggtcgacgacttggtcttggagatcacatgtaccccgccaagattctcaaagatggaccccctgctggtggcaagtactccagtctcgatgagatgatcatggatgctgatggtttcgccggcgtgttccccgagcacaagttcgacattgttaagcgaatccaaggtctcggacacctttgcgccatgactggagacggagccaacgacgcacccgctctttctcgagctaacgtcggaatcgctgttgagggagctaccgatgccgcccgaggagctgctgatatcgtcttgaccgagcctggactctccaccatcgttcacgccatccgaggatcccgaattattttccagcgaatgcgaaactacgccatctatgcctgtgctgttacgatccgaattgttgttggattcgccgtgcttgccttcgcctggaagtttaacttccctcctttcatggttcttattattgccatcttgaacgacggaacgatcatgaccctttccctcgaccgagtgttaccttccatgactcccgatcactgggatttggccgagattttctcatacgccgttgcctacggactctaccttactctttccaccgttgttctcttcatcgtcatgcacgataccaactttttcgaaaacaggttcggtgttgaggccatcaaggaggtcaacgataagaggggtcacatggttatctacttgcaggttgccatcatctcccaggctttgatcttcgtcactcgatctcacggatggtccttcatggagcgaccctcggttgcccttatgctcgccttctgcctcgcccagctcatctcttccatcatcgccgccttcggagattggggtttcaccaacgttcagtcgatctctggtggttgggttggaattgtctgggtctggaacattgtttggtacttccccatggatttggtcaagtttgccatgaagtacactgttatcgcttggttgcgaaagcgatctgctgccaaggccgaggctgttgcccaccaggacactggagctcccatgcagcgaaccgtctctcgacacgagtctttgtactccaaccgaacttcgttccttaacaagactgctcgacgagtcggacttggaaactccaaggtttcgatgtccaaggctgagcagcagcgattcggagcggcccaggcttcccagactggagctaccctcgctcgacacccttccagagtataaatatcggtttgaggccatctttctttgtgcttcccgtttttttgctattgctcgcttctcttttttcctatcctagcatttctgttttacttctacccgcctgtcatccttgctttgcgcctagcttcgaattttctctctttcccttctctttgttcttcctcttctactagtatccgttcattgtatgagtctcaatcggtgttttctcctctatcccccccgtccccccttatactggtcatagacgtcaaactgcattgtcttgaccctcgcgtttgtttcaagatcgtgctgtttatacttgctatcatcatgtttgtagttaaaacaaaaaatcagaaatcaaaaagaaagaaaacaattgaaagacatcgaaaaacggtagaaagagaacggcggcagccggaatgttcggcccggtgttccgagggaatgccgaatgcataaatgaagactagttaataggttgaactaaacccgttcttggaacgaacttttatcccatcatgccttctttgctcagtcctgtgtttgccagaaacttagccaggtctattctccgtcgtcgtgctgcccaacgatcgttctttacggcagcactcgaacctctgacgttcggtcggcaagccttgattgtcagtgaacgttacattctttgctttttatgtcttgatctttacaagggatcagtggaggttgatgttgtaaaccattctttcattttctgcatctccatgttgtttctgtaccagacggtcggggtcacctcgatagtcatcgggacgacgctctactttaacccaaactctcctatacatcttgaatcatccacgaatgtgacctccgatggaggatccaagcgaatgagaaggtcggatcttatcccgatggaggaggtagaaaaacacaataccgaagatgatctttggatcgtccttaatggtgaagtttgggacctcaccgagttcgcagcagaaggtcatccgggaggaaacactccgttggccagagccgcggggagagatgcgtctaatgttcgtacatgccattcgttcggttctcattcggatgaccgccctcacttgttgtagagctgcagaggagctaacgatatccatgtgggtctttccttattggcttcttttggtgtgctctttggtgtgatcgaccggatgggtgggttgcccaggtgttcaatccgcttcatccgccagggacaattgagaccgcgttgtcgaacgcatcgttgccggagaccgccttggtgggaagaattaatccggcgaccgttaaaaagatcgaaaggcctgagcaaggagaggtcattccggtcaaggctgataaagccgaggagaagatcgatctagggatggtcattggtttaccagacttcacggtatgatctttattgttcgctcacccttctattgtggtagagtcttactaaaatgaaaggaactatttatctatatgtcttgcaggctgcagccaagcagattcttcctgctaaagcgttcgcctactattccgctggaggtacggatgagtacacattaggacttaaccggtcttcgtataaccagatcctcttccaaccgagaattctagttgatgtaaaggaggtggatacgtcgacaaagttcatgggacatgacgttagcctgccgatgtttatttgtccttgcggaatggccaagctcagctcgcctgagggagaagccgttcgttcttcacagtcttttattttccttgtttaagagctcgcccgagttcgtgttctgtatcaataactcttcgatttctggggttgcctcgtttcgtaaatcgatcaggcgttcgctagtaagttatctctgagggttaccattcatttcagacgaagagattgactatatcatcgctttgatcttctctagctgctgccggcaaatgcaacatcgctcagtttgtttcgaccaacgcttcggctcctcttgcagagatgtgggtcatctttcgttctctttcctctctatcacctcgtgtctcgctgaactagttcgacttctgtccgttttagtatcgctggggctgtctcgaaggagcaaccattcttcatgcaactctacgttgaccggtaagtacacatgtccccttatcaactgtcggcttctcgtatgtttgcgttctgagctgtatatatcgcgctttcgtctgcctatagaaatcgacagaagaccgaagcattgatgcaaaagatcgaggctagcgggcagatcaagggatactttgtgactgtcgatgctgctgctcctggtaaacgagaagctgacgagcgagttagtcgtttccctttctcatcttcagctctatctttgtcttttttccggagcttgatgagtttgcttcgtcttatcatttcttcttttctttactatccagtctcgagcagaagttgaggctcagtctgggatgtccggcggtcgaattcaatcagacaacaaaggtggagggatcggtcgatctgttggaggattcatcgacccatcgttaaattgggaggatataaaatggctcaggtctagaacaagcttgcctattggaatcaaaggagtccagacggtggaggatgccaaaaaggttcaatttgttctattctccttgtcccgtcatattcatctatcgccttcttccataagacttgtggctgatgataatcttctggggttgttgtttatgatgcgccacaaaggcatacgacgtaggtctagatgcaatttacctgtcgaaccatggaggtagagcgctggacggcgccccccctccgatctatactctaatggagcttaacaacttttacccagagataatcaaggacaagaaatgcgagattgtacgtcaaccatttctttcttccctctctatattttgccagagcaaagagaacatccaaacagcattctaaaacaattgtccgacttaatagtacatcgacggagggatccggagaggaaccgatgtcattaaagcactctgtctaggtgccaacggagttggagttggtcgaccattcatgtactcattggtgtatggccaaccaggtgtcatccatgctatcgaaagtcagtctcttcctctctttacttcctcttcccatctgttctccgacaaagaggatgattgactgaagcaagaaccggatgcgttgtctttccttctttcaagtcatgcgagacgagatcgagacaacgttgcgcctcttgggtgtaaccaagttgtctcaattgggacctcacttggtaagcctttcctcttacactaacaccttgttgataactttaatcgcgctttaaatatacttcgagctaacggcgcactttttcttccttactttactgataccacgcctggcatagcttaacactcgagcgttggatcctctgatcgcccaaaaaccttctttcggtccagatgaacaaaagcgctaattcatcatctacccgcctgtcttttaatatcctcttctttctttctgtacatgatatccatatgatctctctgttctttctatattgctcttgtcgatgacggtatgttgtaccctatgaatgtgtctatctttctcgagcgatcaaacggatcaagacaaccgaagggtggttcgcatgtatatgatccttcttgataaaatatgagatatgatcgattatttggacagaaaacggcaacgatcaacagtgactatcaagaacaaacgaaacgggaagaccggcagatcaagttgaatggagagagaaaagaaaaagatgtttgtacaagaagtgagaaatctacatgctctttacagtttagctttcattcctcaactttctgaagaaggaggcagagataagaaaggacctctctaaggtcttgaattttcaactctaccaaggtgctagtgaccaaaccctctgactccttttgggacttcatgcgcggccgacccgtttggctttgcagatttagttctcacacctttggtgtaaaacagataaccgcaaggccacgtatgctgtctccgtcctgactcccatttccattcggtcgggtcgatcaggtcagtcgaatcggacgcctggttgatgagatgttgcatctaattgagaaaaatagaaggattggactagtcatcagtatagaaaagaattggaagctggggaacaagagggaaactcacatgatcaggcgttcgaaccctcatagcggacacgtacccatctagaggaggggaggagagaaagaataggatttgggatcgatgagacaagatctttgtgagaaagcatattgaaagaactaacccatgactaggaagaagggaatgataggaacaatgtaggtgaagaagagttgagctgatggtaaagggcattggaatgatgcgcgcgaatattaattcaacccgaatctcgtacagaggagaagagagagccggagatttacctagtgtaggcttcgtgaacggagtaagaatccatgtcaaaggagcaatcagcgtgatgaacacgaaggatgcaaagtctactttctgcagttcgaatatgctgtgtgtgatggtaaatatcagagcatgacagaaatcagacaacgagctacttctttgatctcttcagagaaaaccctaccagacagcatctcccgcaatcatcgcatcctttatgacttgtaatgcgagttcttcattgaaatggtggaaagcaagacagaaggttcggatatgtgttcctagatcggaaaccaacgacgcaggtggctgggttgcatcaactggatttggatgatagctgatctgatcagaagtgaaggaaggaagaggcgatggaggaaataagtcggtacaaagaaaaggaaccggacgaagagattgagcttcacggtgagcgctgaagggaatacaagactgttaactttctgctctcaaccagtaggcagtccattaagagatacatggcgagagatggagagagggagatactaacttcaaggcagcctcgattttcttcatcggaccaccgcctcccgaacagaagtcaaccactcggaccttctgacctccaagctcttgcacaacctctcctagaacttcggctgcacactcactcggtgctcttgtctgaatcggccagaaattcgtaatccagagcatcgtcaagatcttttggaccccctctctgatgggaactggtgtgtaaggctgttcatggaactcgatgagcctgggtagttgctttgggtatgagtctcttgtcgtcagatccggtcgtcgaagatgggcgagctctacattaattcctggtccaaaggcgatccctaggatatctttccttcctccgcgttttcgcccttcttcgaaaacataaccgatcgaggccgaggacatatttcctctgtctttgtagacggcccagctagctcgagagtggtcctctgggctgattccaccaagagattgctcgacggaggagatgatgagtgatccacctgggtggatgaatgcgtccatgttgagagaggacagcgcaagggtctttgattccgaaggagctatgaacgcagttactaggggctcaaccaaggtgctagtcaccactggaaccttgggagtgatgaccgcctgtcgtgtttgaagagatttgctcgttaggtctgagccgagagagaggaaacagtcatagaagagaatggagcacatactcgccatccagtctcacaaacgtcgaaagcaagctctcgactcgtctctgggattacttctactgccgtctttatgatctcgaacgaaggtttttctacggcaaatcaaaccagatccagatgcttaacgatcagcaagatcaactgatgaattgtgaagacaagagaaagaagagccatgttatctctttggacaaaccaaatggatgtaggtctcgtccgccaaccaccaaaccacttgctccgtcagcaaagagtaggacggggatattgagcttcgagaagagaccatagaagaagagcgtatattgatttagtgactatcgcgagaggatgtgatcacaaatggaaacacacctggcctgattcatccatggactggatctcagtcctcatcattgaactcgtgatctagatacatcgatcgcgtatgatataaaaaagtagataagagaagaaggagataagcgagccagatatgctgagctatctatagaccagatcgaacatacctcacaagctacacagagcactctggcttctgggtcagcgttgcatatgtcggctgccagccgaaggatcgataagcctccggcgcaacctactccggtgatcattgtctttctgagatgagaagaaagttctagtgcctcggcgacgaaatgatcgaacccagggtatgatgacgcggtgcatgtagctggtagattggaagaaaatagatggtcatgatgacattcgacaagagggttgcggtaaagagtgagggagagaaagagagagatcaagggtcgcgcacgtactgctcagcatgtgagtgatacccttcttgtctcctccccagtcatccagggcattcttggccgcttcgatagcgatctgaacgcccttgtcgagaaagacgtcgacaatctcgcctatactgggaggagcatccttgttcagatggttcgagtccgggctctggacactctttcgatgaagaatctctgttcggtggttgatcatgatcgtcttttcaagcctgccggattcgagtacggaaagagagcgtgaatcagaaagtcatgttcatacacacacacacacacacacacacacaaaagccttgtcagaggctgtctcggaaggacaagtagagcgaagaaggaatctgagtcgtcctggacagtgatccagcagccgtccatcatactatcactgcttctccctttgtatgtatgttcgaagttctgtgtgagtattgatcatgaatgaatcaatcggccggcttgatgtgtctattccgatggtgtgccgtgcgtgttcgatcagattcttccctccgcgcgctgtctcatcttgaaagagggtactcgacgacacacacacacacacacacacacacacacacacacaccttgtggaacccacatatggcacagacagcatatctacacatacgtagcacatgcacgcgcgcacacacaaataaatatatatgtacagatgaatcactcacgctgaggacggaacagcgtgcttccgaaggagcacgtcgaaatcatcggcagaaacagagaacggtggttgagctgtacctatgccgagaatacttggaggactcgcggtgggcatggtatgagaggactgaagagaacacggaggaagagagcggaactaagagattgaccggatagagaggagatggaaggttagtgtgtctgaatagatcgaatcactttctggtcgatctctcttgagtcaaaagaatatgcaaacccagagtcaattgtaacgcttcgaatggatgcccggcaggccatgacgcgtgtgttggtggacgagatggtcatgatgcgttctcgtcaggcttcgatggcttcatctttatgtctgaacaccatcacattcatcctctgaacagcgttgtctcatagccatggccatcctagcttccgtccctttgctccttcacactcttcttcttctgcctccgtcattcaaattcctgcttgatccgcctccgtctccgcctgccgtccgacctctcgtcagatcttacgccttcctccttctctctacccacctggcctgccttgttcttacattctcactccgacctggctcggttattctggcccggctcgccatcgcactcgctgtctatcatttcggacccatcggtcgagcgtggggtcgattgaagaacggagagttgacaggagagatgggtggtccgggcgttcatctctgtctgcacatactcgtcctgggagctctgtgttgggaaggttggagatctggcttgggcaatttatgatatatgtactcggcgaacaggtcgatcagaaatctgtgtagacttttcttaacaacagatttgacagaacgccccaatagtctggcatatcattcgtcacacccacacccgcgtctacagatagatcgaaatgtcatgtatcccgcatctgtctcaacctgaccttcgtctcgagcggacgacgagagatgacttctcggacttgtatctctttccctcgttgctgctgctcagacttttcggccatagaaggagagaacaggtcgtactcttgcacgagtcgagcgacaaacagccgaagaaaaagttgctgttgagcgtcgacctgacggatcagtcttcaaggaaaaacgaaccaacgaagagaaaagaacttgagcagacaaagaacaaagatagacgtactgcgaatcggatgccaaagcaagctctggtacccaatgaaaacgggtgactgccaaccctgctggcatcgtactctccgctctctggatctagccatcggtctagattaaaggtttttcccgcctcgacctcggctccctttccggtcgcatctaacaataaaacgatcgacgtgcctttctttatcggatactgaatagcctccgccgaatctgtggttgaaaggaggaaagtatcccgaatggcctcccgagaagtcagcgggattgttcccgccagtcgaagggattcggaaacgaatgatgaaagaacaggaagagatcctgcaaagagtatgcacccagatataccgaaaagcgagtaccgagacataagacatcaaacgggtgtaaaaagaaaaaggagaaactacaaaggaaaaaaaaagaatggggagaaacgaacgcgacagccccatgatctctgcataagataattcgggttgagaaggaagcatctccagctcttctcgaatcctgcgctgtgtgtctggattgaatatcagatggttcagaatccagcaaagctgggaggccaccgtatcgtctccggccagcagaactgcatgcaatttgttagtccacaggatgagatggaatgacatgcatggaagagttgttcatcgaggtgaaaagaatatgacatacgagtgaagagctcgtctcgaacttcattcgtggatagcccattagtctgatttcttctcagacattctttcatcacactccacggagcagccattccatctaccaccatgggcacagattcatcttctgccatacactgatcgatctgttgccccatccatctaaaaagtctaaatcttgcatagtgataccgaatattaaacgtccgtttgaatggtgtgatgatgggtatcggattcaatgtcttgaggaattcggaaatgggatcgaacgcgaggagatagatcagatgcaacctatgtcagtgattgtgtttgggactatagagtcgtataacgatacccttattcttcgatagactgacatcgaatacaacttctatccaactaacgacctggtgagcttgttgcgcgttaccatcgctcttctctaaaacgcccagatcggctccaaatataaagcggagcataatctctttcgtcaagagtgagattgatctctcagcatccatgagagggcctcctttgtcgttaccggcctcagcgtctggaatggatgaccatagcttgaacagccggtcgatgctggtatgcataatgggcatggcatgtttatcaagcgaggacgcggtgaacgacgggacgagcatcttcttgtgcgccgtgaaagtcgaatctgatggcagaaaagatttttacacaaaaaggatgagcagaagatgtttaagaagccttgaacgatgcatgccatgagaattctcggacgagacacgtacctgagttctgacagagcatgcttccttgacccaacacacctcgaaagacgcccataaagaaggaacctctgtcgaaggaagccttccattctttatcggccaggacccgttcgatccccacacgatcacataccagcactagtggctcgccaaaaatggagatctggcagagtgggcctagggatcgagcgaactgagctagaagcaccgacggggaagaagtcgagaaaaggaaggtcagggcatctccaaaaatcggaagtgatgtctttggacttggtatccgagagagagtctgatgtgaccgggacttcctgagagtgagtgccagctgaacaactaaaataaccaagaagcagccaagaagagccagtggtgagaagaccattgatcgtccagaagtgatcgttgagttctcaagcgggaatgttggcagtagaagtgtcgtcatgatggctgggttagggttagtttacatcaagcagtgcattcacgtgattagccacaatcctgtacaacacacgtgacgtgtttttttctaagccctcctttcctttcgtttccattcctttctttcctctctcctttctttctccctctctcctctttcttctccttcttctccttctttttttccctctttctgtacaaactcaaaactgtaaaaacctcgttaattaagaatcccaaaactcgcattatgtcagtttttttctccttctcccgaacatgtcttcatttctttcaagagtgatctgcttggaaaggaaaaaaaaacttttctctatgtccttttttctccttctttatgaagttgcaatgtcgctttcggatcatcctggcttgaaaaaacctcgcggtatacgtactggtgaactgacgaaactcttcgccttggtgtttttccatcggcttacgaccgttgcgatctacagccttggacgattctcatcttgtgacaaggactatctctcaggactattcaggacctaagagatctgtcagtgaacttttttctctctttctcttctttcctctccttctttttacaccttcggaggatctctccttctcatttcatcaccaaagccttttctcggctcgatttgcaacgattcaagtcatacaaataaatttcgaaaaataaaaaaaagaatatgattggaaaaattttactgacaaatttttgctcgtcgaactccgatgtatcggacattcgccgataattaattttacccggtaaaagctctttcgcctcttctttcatcacacttcacccacatcccgggtttc

SEQ ID NO: 3125 - DNA, 6059 bp, Xanthophyllomyces dendrorhous
cctgtagctggatccttgtcttgatcttctctttggaggaccgctgctgacctttgccactttggacaaacaaattcggctttcagcccacgatataacttttgtctctttccgctcttttctttgaataaataaaaaagacaaaaatgtctgcctctccttctggtcttcctcctatgccggctcccccggtgccaagctcttcggagtctcaggctccttccgctcctgtcgctggtcactcggccgttaacgctgacgagcccgtggctttccccactggcgccgtcgccgtccaccctcgatatcccgtctccaacactgctaacgtcgccggctcttctgacagccagcttttcccgcctgctaccggtcgaggactcacttcctcgaatgagacctccggagccgaggcttgggaggatgaggaggctgatatggtcctcgagctttcggacggaaccgctttcgagggtcttggatttggtgcctctgataagagtgccggtggagagtgtgtcttccagaccggtgagtttctattgttccttctctatcaaacaaaggaatcgaactgaccttctggtcttcttcatatctcgataggtatggtcggttaccctgaatccctgaccgatccctcctactcgtcgcaaatcctcatcctcacctaccccatgatcggaaactacggtgttcccgctcgaccgtcatcccttgatcctgtggatgtcaaccttccgactcttccggtcgagttcgaatccagtaagatccacgtcgctgctctcgtcgtcggcgcgtaccacacttcgttctctcactatcttgccaagtcttccctcggcaagtggctgaaggatgaaggcatccccgccatctggggagtcgacaccagggctttgaccaagaagattcgagagaaaggagttatgctcggtcgagttttggccaggaaggactttacgccttcaacccaggagaatcgaggacgaagcttgattgcctcgatctcttctctcccggaacgacttctcggagacgcctcgaacgcttctcccactccgtccccttcgaggcagccctcgtcggagtggagggagaagtaccaggttgtccccttttcggatcccaatttccgtaaccttgtcgccgaggtgtccgtcaaagagcccattctctacactcctaagggggtttctggagttgagcccagtgttcaccccagagagggtcgacctttgagggtcttggctttggacttgggaatgaagtacaaccagatccgatgcttcaccaagcgaggaatcgaggtcaaggttttgccttgggtcagtttttcctattcctcccccaccccttcccctttgtctcgctcgttcgcgattgaagcagccgtacttaacttgtcctgttctctttgtatttgacaggactacaacttcaacaagctcgagcaggagccgtatgatggtctcttcctttccaacggacccggagacccctctattgtctctgccactatcgataacatcaaggaagccatcactgctgccaaggttcccatctttggtatctgtttgggacaccagctcctcgcccaagcttctggagcgaagacctcgaagatgaagtacggaaaccgaggaatgaacattccctgcaacagccgagcgtccggtcgatgctacattacttcccagaaccacggttaccaggtcgacgtttccaccttgaccgacggatgggaggagctcttctacaacgtcaacgataactccaacgagggtatctggaagggtaaggacggtctcccgtacttctccgttcagttccatcccgagtcgtctcccggtcccaaggataccgagttcttgttcgatgttttcatcaagagcatgaccgattgcgccgaggccgagaagctcgtccctgttcaaatgcccggaggtgacatcgaggagaatgcgtcgaagaaccccaaagtcaaggtcaagaaggtcgtggttctcggatctggaggactctcgatcggtcaggctggagagttcgattactctggatcccaggccattaaggcactcaaggaggagggcatctacaccgttcttgtcaaccccaacatcgccaccatccaaacctccaagggattggccgacaagatctattaccttcctgtcactcctgactttgtccgaaagattctcaagtacgagaagcccgacggaatctacgtcaccttcggaggacagaccgccctttccgtcggaattgccctcaaggacgagttcgaggagctcggatgcaaggttctcggaacccagatttcgaccatcatcactactgaggatcgagagctcttcgccagggctatggaggagatcggagagaagtgcgccgaatcggccaccgccgtcaacttcgaggaggccgctgtggccgccaagaacatcgggtacccggttattatccgagctgctttcgctttgggaggtctcggtagtggattcgcctcgaacgagagtgagctcaaagccttgtgcgacaaggctttcgccaccagtcctcaggtcttggttgaaaagtcgatgaagggctggaaggagatcgagtacgaggttgtccgagattgcagagataactgcatcactgtctgcaacatggaggtttgtcgttgttcattttaaaatccagtctgtcagcctttgggctaatcgaaactaatcaccggttccctcttttccagaacttcgaccctcttggtgttcacaccggagattctatcgtcgttgctccctcccagactctttcagacgcggactacaacatgctccgaacgacggcgaccaacgtcatccgacacttgggtgttgttggagagtgcaacattcagtacgccttgaacccttactccaaggagtactgcatcatcgaggtcaacgcccgattgtcccgatcttcggctcttgcctccaaggctaccggttacccgctcgccttcattgccgctaagctcggtcttaacattcctttgaacgagatcaagaactcggtgaccaaggtcaccagcgcatgcttcgagccctcgctcgattacatcgtcgtcaagatcccccgatgggacttgaagaagttcgccagggtttcgaccttgctcggctctagcatgaagagtgtgggagaagtcatgagtatcggtcgaaccttcgaggagaccattcagaaggccattcgagccatcgatgattccttccctggtttcagtaccgttagtgtttatcccttgcttgttctgttagtcaaatgagagcaaacatgctaattaatccttttacttaacgcagaacgactacgtggatgacatagactccgagatccgaactccctctgacaagcgactcttcgctatcgctaccgctttcagccgaggctactcagtcgacaagattcaccagatgtccaacatcgacaagtggttcttgacccgattagagcgacttagcaagatggagaagttggcttcgtgagtgattctccgtgcagtttgctcccgcttgtcctttatatcttgttgacgcctatttattttctatctgtagcacctactctccctcttccgttccctctggtttaatccgacagtgcaagcagctcgggttctctgatagacaggttgccaagttcttgggttccaacgagctcgccgttcgacgactccgacaggacgccggaatcgctcctttcgtcaagcaaatcgataccgtcgctgccgagttccccgcattcaccaactacctttacaccacttataacgctaccgagcacgacatctcgttcgaggaccacggagtcatggtgttgggatctggtgtgtaccgaatcggatcctctgtcgagttcgattggtgtgctgtcaccgccatccgaacccttcgaaagctcggtcttaagacggtcatggtcaactacaaccccgagacagtgtcgaccgattacgatgaggccgatcggctctacttcgagaacatctcgctcgagaccatccttgatatctatgatgccgagaggtcttccggagtcatgctctctatgggaggtcagacccccaacaacatcgccctccagcttcaccgacagaacgtcaagatctacggtacctcccctgagatgatcgatactgccgagaaccgatacaagttctcccgaatgttggacaagatcggagtcgaccagcccttgtggaaggagctgaccagcttcgatgaggctgaagttttctgcaacaatgtcggatatcccgtccttgttcgaccttcttacgtcttgtccggagccgccatgaacgtcgtcttctccgccgacgatcttgcgacctacctcaaccaggccactgccgtctcccgagaccaccctgtcgtcatcaccaagtacatcgaggaggccaaggagatcgagatggacgccgtcgccagagacggaaagatggttatgcactacatttctgaacacgtcgagaacgctggtgttcactctggagatgctaccctcatccttcctcctcaggatcttgacccggagaccgttcgacgaattgaggtcgccacccagaagatcggtatggcgctcaacgtgactggtccttacaacattcagttcatggccaagaacaacgagatcaaggttatcgagtgcaatctccgagctgcccgatctactcccttcgtttccaaggtgaccgacatcaacgccatcgagcttgctaccaaggtcatgcttgacttccccatcactccttaccctgaggtcaagatgcccaaggattacgtcggtatcaaggtcccccagttcagtttcagccgacttgctggagccgatcctatcctcggtgtcgagatggcctccacaggagaggtcgcctgtttcggaaaggacaagtatgaagcttacctcaaggctttgatctcgaccggaatcaagatcccgaagaagaacattttgttctccatcggatcttacaaggagaagatggagttgcttccctgtgttcagaagttgcaccgaatgggctacaacatcttcgctaccgctggaacgtctgatttcatccaggcaagttcttttccttatgtttcaaactagttcattcatatctgatgttttctcccgcttgtctacaatcctctcgttcaacaggagcacggaatccctgtcaagtacctcgagtacctggaggaggatactacccacgacgcccagaagtctgagtactcgttgcagcagcactttgccaaccacctcatcgatctctacgtcaaccttccttccaagaaccgataccgacgacctaccacctacatctcgagcggttacaagtctcgacgactcgcggtggacttcgctgttcccttggtcaacaacgtcaagtgcgccaagctcttcatcgaggctatcgttcgaaacccctctatggagatctccagcgtcgacttcaagacttcgcacgagacctacagcttccccggattgatcagcatccagacgtttgttcccgaggtcgctaaggctggctccaaggactttgccgaggtcaccaaggctgccatccgaggtggtttcaccatggttcaggtccttcctcagggtgtggagtctcagatccacgatgaggcttccctccgagtcgctcaggctaacgctgacggacaggctcactgtgattacactttcggagtttctgctaccagcgagaatgcttccctcatctccgagagcatcacctccggtgcccggtcgctcttcgtccctgcctcgtttgcttctaacaccaacaaggtcgcgaccgtctccggacactttgctgcctggcctgctgagaagcctatcgtgacggatgccaagactaccgacttggcttccatcctccttctcaccagccttcacaaccgaagcgtccacgtcactaacgtcaagactcgatctgacatcgagctcatcgctctctccaaggagaagggacttcccgtcacctgtgatgttgccgtgtactcgctcttctttgc

SEQ ID NO: 3126 - DNA, 15773 bp, Xanthophyllomyces dendrorhous
agaaggctctttgggacaacctcgccgtcatcgacaccttctcggtcggaagcattccttaccagctcggtcttgacctcaagcaggtcgtttctcctttggctggtatcgaggagacccttcctttgctgctctctgccgtgaatgacggtcggttgactttggaggacattaccttgcgactccacgacaaccctcgacagatctttgatcttcccgagcaggtctccacctctgtcgaggttgacaccaacaggagcaccgccttccctacccccaagcactggtctcctctatccgagaagatcatgttcggaggtgttcaccgagtcgtccacaacggacaggccttcttcattgacggtgtcagtacctccactcctttcggacgagatctttccggagaggcttcgcctcgaaccaggaacctcggaagccgagcctcgttctcccgagctcgaccgaccgttcagacatacccctcgatgtcttcccccaagattagcggtcgatcccccgtcctcaagccttactcgccctctcctggccaggtgtctcgaatcccgtcgttccctgacctcactgctgtctctactcctcggtttggtgctatccagcctcacccatcgttccaccgacgacacgtgttgaccgtcaagaactacacccgagaggatctccacgccatctttagtttggcctccgagatgagaactcaggtcgagcgacacggaagcgttgacacgctgaagggccgagtgatctgcaacttgttcttcgagccctcgacccgaacttctacctcgttcgaggccgccatgaagcgatgtggaggagaggtaacctcggtgagcgttgaccgatcatcggtcactaagggagagtccttggccgatacaatccgaactgtcggttgctacaccgatgccattgtccttcgacacccggctatcggatcggctaaggctgccgctaagttctcgcccgttcccctcatcaatgccggtgatggtatcggagagcaccctacccagagtcttcttgatgtgtttaccatgcgagaggagcttggatccgttaacggtatcaccgtcacgatgagtaagcctctttctttgtctttgtcttcgtcttgttgttctgcaatcaagattttttctctttactaataagactttcttctcttttacttcttccttatccagtcggagacttgaagaacggtcgaactgtccacagtttggtcaagttgctctcgctgtactctgtcagcttgaactttgtgtcaccaccttcgttgatgatgcctgagtctgtcaaggctgaggcccgaaaggccggagtgtccgttcacgagtgtgttaacttggatgaggtcatctccaagtctgatgtgctgtacgttacccgaatacagaaggagcgattcgagaacgaggcagagtacgaagccgtgaaggacatgtttgtcatcaacaacgaggtcttgactcgagccaagccgacgacgatcgtcatgcaccctcttccccgtgtgaacgagattgacccggaggtcgactttgactccagggccgcctacttccgacagatgcgacttggtctcttcatccgaatggctctcttgactatggtgttgggttaaaaggaggaacgaatttgaccaaaagtaaaataaattaaaataattcattcgcatcttttcaagagtctttcgacttgttctcttctttcagtcattcttctgtacttccttctcattcgctattcgcctcctctttctattctatcattatctgttcccttcatccttggctctgcattcggaacgttgttacaagcacctagattttctccttttattctatgatttatctttcttccgaactgatccgggtcttggttcaattcatttgcgagcatctgaacaaagagcaatgacgagggacatggaaatacaacacacaacagtaagggagaatgacgaatggcgttttaatcgactctataaaaaccccaaccgagcgaaccctgtgacatctcccaaacgaccttcgccgcgccctcttcctccctctcggaatgctctctgacggatccgagcgcaacgaacaaaggcatgaaatgatccggttcaggcacagctttcttgtagtttggatctcgttggatctcttcgatcttctcgagcgcgtttgacggtcggaacgctcggacgagattgccgactgagcggatgaaaggaggaccgtacgtatcatttttgcctgtgaaatagtctcgtagattatgaaccctggcgtgatttcgttttatgatgacaaatttcgagtcgagtcgagtcagcatctgatagcaacaaagacgagaagaagaagacaacaaccaaaaagttgtttctcacggttgaccggatgcgatgatgatgacgccctgctctcgaagtccgtccagtgctttcccgagtttgtatgagctcaccaatgatccatctcctggaagagagatctgaaggattgggaaggactctttggtatgatttggaaacatcactttgaacggaacccaagctccatggtctagacctcttccttttccttgaatgcctacatagtcgatcccagctgaggtcagtcgatccttaacggcagagacgagccaaggagcggaacgatgtggaaactgttggacgtagtagtgagcaggaaagccataaaagtcgtagatgagaggagtctcgagcgcttcgtttacttggtgtgcatgtttatgaacataatgtttagtaagtggctgcgtgcttgcggagaagaagaggtctaattgatattaaaaaaaaaaaactaggtgctcgagcaaaacattccagacatactctctacagcagaagaatgctcttgaccttcccaatgagccgaaacgaccactattccttgtggctgaagagcttgaatatcttgacctatggcttgccattgtttgtaagctcccgagaccgtgtcaaacaaagtgggcggtccgcctggaatgattgcgtgagaacataagattgggctgaagtgagttcttagttctgtttaagggaaaaaaaaagaagaaaagcgacaaagaagagagagagcgcgcgcgcgcacgcctgaccgtgagaaataaagaacgaaggcatcatgttgataaccttggatacgaattgtagagccatctcgatgtctgtgctgatgagactcagaacgaaagggaatgagatttgaacgagtatataacttttgaaagtttcagtaagccggcggcatgaccgaagttcacattacgcgtgggaaagatgacggtgacggtgaagcccgatcgttggataatcattgttcatgattacataattagcctcttacctaagctacatgactccacctaagcaagatcgccaagagatttcccacggacccggccgagcttccgggccggttggagttccagaggacaaacccgatccggcgatctcttggtaaggaagaagcattgggcgctggacatcgggtgctgggtgttgagaggttgagtgtcgagtatcagatgtgagcgttactggaacagctgatcagttccagcttgttcgtcgaccagcggcttgatgcctagcaccagtatatgtatgtgtctgtgtttctttccttttccatgaaggcaacagattgagtccggtagcaaacaacgggatcaaccataacatgttcaagaggcagaatggagaaagaaaaacaagagggcaaagactgagtgaagctggataggatcctggaactgaacacgacaagcgagaaatttgttgtcacctccttctctctcaatcgacggtcatgtgaagcaacacctagctgtaagtgctccaattcaggtgagtcactcttgaatctcccacatgtacaaacacccacactcagacacatacaccctctctcattttcagtgttggcctagttgatttccgttgtggtgatgaaccaggagaaagtccgatgaatgttcttggctagatatgtttcctttcggtcctgcccttctgcagtctggtgacgcatctcttgcgtccatccgtcattgatctcccttcttcacattcggttgaagtttcgcacggctttcgtcacaaggctgctcttcttactcctaaacttgtttcagtcaagttgagccgtcgtcaccgatcgatcctctctaatgaattcttagactccaaaccagcgacatacgtaaccaaaggtgaccgtaccaaatcttgaagaactagtcaggaggctgtatggacaaagaatcaggaggaatagggaggattcagtcagaaagaggaaatcaaagaagcataattcctcttcaagaatttgtataaaggaacgacgagaatgggctgaatgttaacctttttgtctctcattccaatccttcatactctcagcaaggcaagcatattccaactagacccaacaaccatgctcacttcactcgctctcgtcctctttcccgctatggccctcgcggcgccaacgttcgtgacctcgcctcaacacatatctccaggaaaggatagcaaattggtaagtgtgtgcgtgattgagaaaatcttggtcatagcagcttaccttgttcgcactccttattcgtccatagtgtttggccgttgccaatcagggcgccttcaagaatggagatgctgtggtgtccgtgtcatgcgacacttcgtataccgatggccgacaactttggagagtctaccctggagactctcagatccaattgatcggttcgaacttttgcttggacgctggaacagacaactcaaacaaccagcctttgaagatttggacttgctacccaggtctataccagcagcagtggtattatactgatgacaacagaattgcgatcaccggaggcaacaagtgtcttgatctcggaccgaacggtcctcagacctatcagtgcacccccaacaatgacaaccaggtgagccttgcgcataattccaacattcttgtgtttaaattggcggtaaaagtcaccactggacactgacagcgcagtccttttcatcggttttttgaatgcttcttcccctcccctttcctcaaaataggtctggtacactcctggtacagtggctccccctgtgagcagcactaccgtcccacccatcacgtctacgttagttccctcggtgacaacctcggtcgctcctccggtctcgtcctctgctagtccttctccccctctcggtggacctagcttggtgattcacccgaacggacgaactgatttctgtctggaggctgtatctgcgaacaatgtcccggtcgagggaagtctcgttcaggtcaaagtttgcaccgggcgatccaaccagcgatttgatatttaccgaggggataatctcgtcaggttatcaaactcgaacttgtgcttggacgccgggtcaaacatcggaaacaatgtggcgctcaaggtttggacgtgctaccctggattgaagcagcagcagtggtactacaccaatgacaacaggatcgcgatcaccggcggaaaccagtgcgcggataacacgaacgggatcttgagctctgcaaacacccttcaaacctatcagtgcatcactgggaacaacaaccaggtctttaccgtgtccaactaaaaggagttggcagggttgttctgttcggctctactgtatcacactttcttttctcactgtcttgtatcactagtctatcttttcactctcatagccttatgtgtcggttaagccttcattcaagaaccattctgtctatccttccttttgcttttccaaggacagtgcacggagtttcctttctctctcctttgctggttgatcttagtttacgtccatcttttcttttctaaagaaacgaatgaaaagaggacgtccggatgtatatctactctccaatctatgccatcacgctatctactgatgatcggatgttaaatcataaatctctcttttctgctacctcttcatggatctgaaaagtctctatctctccgatgtgaaccatgttggtcttgctgtcaaatcctcaagatgagaagggaatactctcttaatctcagaagtcggcctttaagtcgctacagagtcagacgaatctgagcgaggatttggagttctgtattttcatcgcctgtcgtgtcctcctacctcagcgttctcttttaaggaagaaaaaaaagaagaaagatagaaaggaagatctctggaacaaagcctttgaagaatccaaaaaaaaactaagatcggttgaatttgaaagcgtgatacttcatgtttatctctgtactgtctggaaagacctatgtgcgacctcaattacgaaggatcaaaccgcctccaccctcatcgcaactccattcgttttctgttttaatctttgggctttcctctggacgcgaaggcttccattccccatggtctaggagcatgagcgaggtccatcttgaaggaccacttcattcggataccgttttgaatggccagaccgtgtctgtgtttttgaatcagcgagagaggaacatgaggagtcatagtatgaagacgaaaagagaagaagggaggtactagcagttagtgatgatcaacaaagaacaacagaggaaaaaaaaggacgaaccctctgatcttcttcggcttcttgggttctctagcaatgaaccgggggtcaaagccctgtctgtacttttcagtgatccattgaacatatctagaaaacaaaaagcaacgcaccaaacatggacgtccttcagattagtgtatagaagagagagggaaggaaaagaaagaccagaaaagaggtattgagaactgacttgacgtccttcgtgacgagtccagcctgagtccagccctctgcctttctagtaaagagctcatcccaggtgacctctcctttgactttgttcttgagatttcgaccggccgctcggaagaacgctgccggatctgttatcgggcctgtgaagggaagtaaagaatgagagaggagcgagaggtatcgagcgaagagagggagaacagatagaagaaatccaaagcaaccacgatcagagaactcaagcttttctcggcacaacaaatcatccagaaatgacttacctttcggttcagggatctgtctctttactttggacccgatgacgaccggagggagttcttctctgatggcctggtcgatgtgcttgaagatctttgttgaccgtgcctggagagctaccggagcagttgtatggaagctgcgtgagcagaccaggcgagaggacgaggctagcggaacaatatggcgagagagggacattgacaggatctctgggctgagggttgacgacgacgacgacgaggagagagcgaacggagagagaaagagagaaagtagaaggtgaggagagagcgtgtgcgtgtggttacacgtgtcacgtggtgtgatggctacattcacaagtcaacatggttacgattgattgatcgatcgatcgatcgatcgatcgggtaagccatcttgccgctgagtacaaagcaagcgcagaggacgagacagggcgtggaagggagcaagaggggaggaggtagagggaagcaagaaggcagagtgaaaaagacatagtagctgagagaaaaagagcgtgtgtatcttgcttcgtctgtgtagacgatcttatgcgagaagctctcgatgggaatgtgcgcgcaaagagtgcgtagcgagagtgagagcatacatgtcattgacgccagccagagcgctgaacatgatcatagagaagaagaaagagcggagtgcgtagagaagcaagaacatactcatacccacactcccataacgagctttccctcgtttgttgtctgatgtctggtgtctgtcgtctggctctggctccagctccggctctggatggatcgtacgatgtttgcgggggaaaagactagacaaattttgtaacgatcaattagaaatatcaaccgattttcctaatgatttttcacccaacactcgaacacaccggaacactccactacttctttttcttgttctcattcttcctctaccttctccccccgagtgtttgaaacgttcacctcgactatcggcttcgactttcaccctgatcattagttctactctcttctttatctttcgatatcatctcgggccaatttagtcttcaacaggcacacgagcgagtccccttctcttccttttttaaccttcacgctttctttcctctcttccgatcaaaacaaacacatgggcaagttcgatatcatcatcattggtgcaggcatcgctggatcgtatgtgtcgttttgtcttgttctagttctctctttcatctatcacattctcacgttcttcgtaatatatcatacagtactctggcgtactcccttggccagtccggccgtcgcgtactgtgcatcgaacgagacttgagcaccccggatcggatcgtcggtgaacttctccagccgggaggttgtgcctcccttagacaactcggtatgggagactgtctcgaggatatcgacgccgttgccgttgagggttactgcaccatggttagtccctcctctctatgtcatcagtcttgttctttcttgccggaccactccgaccacgtgccctaataagtacaacttacacgactttttgatcccatacttaatcccaaatagtacgacggccaccaggtcgaaattccttatccgccgtgtccatctggttctggctcgtccgccggaaagactccatccggaaggatcgaaggcagatcgtttgttcacggtagattcgtcgacaagctcagagcaaaggcacagagctcaaagaacgttgtcatgcttgaaggtctgtcctgtcattcttgtctttgcactcgttcctcttaacttatccaaaacctctctcaattctttctaggcacggtcaaatcactcctcaactgcccggattcctccagagtcattggagtctctgcttctatgaagtcggccgccaaggacaccccgccccaatcgttctacgcaccggtcaccatcatcgccgatggctgcttctctcgcttccgaccgacgaatgcgcctcccccggttgtcagatctcactttgttggtctcgttcttcatgacgcgcctcttccgatcccaaaacacggtaacgtccttctcggctcttcctttggccctgtgctcctctaccaaatttccaccagagagacacggatgcttgtcgatatcaaaggcaagcttccctcgatcggatcgggtgcgctcaaagagtacctcgaacagaaggttgttcccggcatgccttccgagatggaagcctgcctgaaggacgcgttggacaagtccgagcaaggaggagacgccaggctcagagtcatgcccaacagctggctccccgccagacagcagtcgaccggcaagaaagaggacagagagggttgcatcgtgattggtgatgcttggaatatgaggcatcccctcaccggaggtcagttctttcctcttccttcgtctgcctatctccttgccctctccattcttttcgaatctcacctcacgatcatgcttttcttgatactacacaggaggaatgacggtcgcgttccatgattgcgtccatctcacaaacatcctcgccccgtcaagctcactcccggaccttgaagattggcacgagattgcgcccgcacttagaaattggtactgggagcgtaaaaacctttcgactgtcgtcaatgtgctttccatcgcgctctacgatctctttgccgccgatggtgagttgtgttgtttttccgtgttgacgaggtcagcaattcttactgacttcctttttcttccaaattcactcagatccaaacttagaggttcttcgacagggatgtttcaagtactttcaactcggcggctctgctatcgctggtccggtctccctcctctccgcccttgcacccagaccgctcctgctgttctaccactttttctatgtcgcgctgtacagtatttggtgtatgtttttccaccctcaacccgtccaccttcccagccgtgatggttcgtctcttcttctttgtcttccctcttctcacagccaagtctcatccaactgtatcactcggatctaactcgtcttgttcttttctcttttaataggcacgtcgactccgctcgaggaaaaacagttgatggagggcaaggaaaagccacagatcgtttggaaaaagccaagtgtgacagagtatccattcctggttgtcaaaagtttccttgtcgtgagttctgtcctgtttttttttccttctgtgtgggtgtactataactgactcgatcgtcaatcccgactgaatcttgttctgtgttcggcgcgagtacagttctggacggcctgccaagtcttgttgcccgtcatgtgggacgaacttcgataactttcctttctttgctctttctttcgttctcaaggaccctatctttgtttcttgtttctggtctcttttcatttcttaatctctaacctccgatctccgatcttttccgtattttacacgcaagaccaactcacttcccctctcttctctgggccatcgctatactccttttgctgtttcgctttctgttctctatccattctcatacctcgcaaaagggatcgatcccaaagtcgattctgttcggtccgtcggtccgcccgtttgtttatctatccatctgctctactctaccaacatagatctagaagaccagaacttgtaaaataatagtaatgatactttcttccaaccagtacagaggaagaaggttttgggggtctggtctcgattggaagggggttgcgaaatccagaacgtcaacgctgctctcggtgttgatcgagtcttgttcattgtcatatctccactcttcgtcctccgcaacctgatctctgacctcctttcgccttgttgtatcataaagacaacattccagccaggcagatgtgcaagaagaggacagaataagaattcgaattcatgtcccatgctcgttccggatctcttttacgattacacatattctacatgcacctgactcttttctgaaagatgcgctccaatctcttcacttgactatctaccaagacggtcaatcgatcagttcgccaggtgatcagaaacagagaagactgaacgagacaaagaagaaaaggcaaacaaatgaaacatacatctaatcgtaatctcttcctttgcctgatcgtctctcgttcttcttttcactcctccgatctttctcgaccctcacccgtttcttctgagcgacgatcagcttctgaaccgtctgtgactgagcggtcgtcgtcggttttggtgagagcggtcttgccagactgagtagatgcgtttgaatctatcggatcggttcgttttggtttggtatgtcgacagaggcaaatacaaaggtggttaacagggcagttctcggtacacagattagagggaagaacgtgaaaggacgaaagagtttgggttgatagccgattcaaccgaggcgcaccttgtcgaagcaatcttgaaggttttcggattgtgtacggtacgaagaaccggtgatgagcagtgaattagacgaagccgcgtagtatggctatacagagcagagcagatcaacaaagtcatcacagtggcagatgagaagctggagaatgacatgaaacagatcataaggcaaaggacaagaaactagcagagatacatacagagtcacgaagacaagataaaagcgaggaagggatccaagaagcttgatctatgttgacttttaaggtcgcctttgtattgaccttagtttctcagttgtcaacaaaagtgaaagcagaagggattggatcagcttcaacatcatctaggataaacaagacatacaggttctcactttgttaacgttctgaccacctttacctcctgaacggtcaaacctgtattcaggtcgaatgcgactatatcgatcaatcctctgcatgactatcttcttttccattctagaaatagatattcactcgcctgacctcacacccaggtctactcttcgacaaccgttcccgcttgaaactctccatccagtctctcagggcgagcgtctcgtccggagggagcggactttgccgagggcctgttgagctaggtaagtttgagatgaagcgagatcttgtaagaaaccccggacagcagcgagtgcgctgagagaacgaaacaagagagatcattctgaatcaagcaagaagtagataatgagcagcctggtatgatagtcagacttatggatgtatatcgttcgaaagcctggaggaggatcgcccagttcacccgtcacgtgaccgtgctcatatgttcactcaagagcacacgcccaacggaagcgaggagagcatatacagatccttcatatcggtgactctcatctcctcgtttccctttctgggtatcccaataacgatcatggtcatggcgttaaacactatatggaacgaaggtaggtcttgtttccatctgctttgttcgttcacttgagccttgtcttggtgtctggcagcctcgtctcctttctgtcccctcgcgtgctcatgctctctcaacgataacccaaacctcacaggcgggttccagatccaagttgaaaactatcgggatagatacaaacaaacgatcgactctcatcaaaccgctagctatgttggcgccagatggatcgataaaggaaagggaaaaacagtgatcactattctcgagtctccatcggcaagtcgaccgataggcggcaaccaggctcgaccggaggagtttgtcgatcgtccagatcggaaccacatgtcggatagtcctaaaagattagcggtcattagcttggaagacataagatggcatcttgtcctgaagggtgatgtacatgaaggttcgtccgatgccacttgtccggtgagattatccttaatcatgccaatctgagcctgctgacgttatcttttgccaggcctgtattccataccggtcaacggaaacaaagacttcgacttggtcattcggaaggatggaacgctctcagttagatgtctgggaggaagcttccagaacggcgtgattgaagctaccgtcaagatacctcctcttcaaatcccgtgggtttcccaaaccctcaattcctcagttcgagacgaatggctaacctcgaggtctcatctccttatgcatttttttctattgcatgaatgaacatatggaaaactctatgctctctttgaagatcctctccaccagataccctgaccgcctgctctgccgttccctccgacccatcgaccgatactcaacctgatctccaatcgtgccatgctctttctcctaccgcatctgagctgaacacacctccttattcagaccgttcatcgaagaaccacccacatgtttcttccaatcggccggcctccaatccgtatactttgtccgaaatctcaccagatctgatgatgctcttggaagaactccgagcggatcaacgccggattctgcagaaagaattccaactggtcggcgctgggttcgccgaaaggttacttagcggaggaagacgtctgatgggcgtgagcgagcctcaagagtatgttatctactagtctctgatctattcccttttctgttatctgtcatccatcgtgcgcgcacaacggggctgattctaaggacgacgatgataccgaatgatgacgtctcctctacagattcttatggatgacagcgctgatcaacctgctggtgatacctacgatcctcttggtgatctatatgtataactctcgtcgacaatccaccacgttcaccaccttgtttttttcgtcttatgaccgggcacgtgaacgagtccgtcgggtccgtggtcgtgtgttgacgacgcctcctccttccatagctgctgtcaatttcatcactcccttctcaaactctacctccacctccacttcattctctctgaaccctttgacgttacctgtcgctggacccagcatttcctctttatctatacgtcctgttcatttagaagatccaacttcgttcctgatagatcgggtcccccaatgctgtctcgtcagtcctgacagagaaggagtgagggatgatgttttgcccccgccgtatccatgggaagaaagttcgccagactatcttagttgaccagggtttcttctatagattttactttttatattgtgtatttagcctttgttgtcttgcctgatacttgtatgattgatgatctaacgacctttttgtattgtgatctcttcagttgaggttgctctcaaccttgcttgtattgagatccagtcacgagaggatgtatgttgatcgatagtattgtaatttaaaaaagggaagcaaaaccgaaggtaggtgggtagtaataaaacagagttctcctatcaaggaaggaaagtgaagaaagacaaaagagacagagcaaggtaaatagaaagagaagccagttccttttcggtttctattaaacctcctgggaagcagcggccttcttgggctttccagacttggccgggagcaactcaggctggatggaaggaagaacaccaccttgggagatggtgacgtgtccgagaagcttgttaagctcctcatcgtttcggatggcgagctgcaagtgtcgggggatgattcgggacttcttgttgtctcgggcggcgttaccagccaactcgaggatctcggcagagaggtactcaagcacggcagcgaggtatacgggagcaccggctccgactcgctgggcgtagtttcccttcttgaggtctgggagagagattgataggtaagtgaagatcctttggaccaagacaagggcagatatatatgaacgtacgtcggtggattcgaccaacagggaactgaagtccggccttggcagatcgggaaagggtcttcttatcagtttcgactcctccagcctttcctccagactttcctccggctgactttccagacctatgatgagcaatagaaaacatatggatcagcatccagaaacgaacgaaagtgaggttcaagataggcaggaagcttacattgtgataattaggtttgggttggggtggagttaaagaggagttgttgtggtagtggtatggcaaagaaagtatggatgagagcagaagttgaggttcaaagtcgagagtgccgggttttatagagaacatccgacgcgtctgagaaccttcacaagtcgcgtcgtggccaaaaattgagacgcgtcttggaggtcgtgttccagatacactaccaaacctcattaaatattcatcaacgcccaaaaaatgatctgatcgatgcaaaatttagctgaggacgagcataggtaagttcttcatcaaaacgtcgcttgaatggatccaaaggatgcattcaaagaggagaaagaaataaaaaggcaggttttgcaacgtgtgtttccggatgtgacgcgtctcctgtcgatctatataagaagactttctttccgtccttcagtttcccttcctcccctcttccttcatcaatccaactttgctctctccaaactactttctcagccaaccgtttctccccactattcaaccttaaacaatcaaaatggccggacccgcttccaccgcttctaaagcccgtgagttcacctcgttctgttc

SEQ ID NO: 3127 - DNA, 10973 bp, Xanthophyllomyces dendrorhous
aatggctttgagtcgtcgaactcacgcgtcctatttgcttcttttttctttcagccgcctctaaggctcctgcttccaaggctcccgcctccaaggcccctgccaagaagtccactacttcgaaggcccccaagactgagggtgacaagaagaagaagtccaagaaggtacgcaatcaatgcttttttaaattcatcacttgcgaactcaaattgatcacacctccttctcccaactctacagagaatcgagacctactcttcctacatttacaaggtcctcaagcaggtccaccccgacactggtatctccaacaaggccatgtctatcctcaactctttcgtcaacgatattttcgagcgagtcgccggtgaggccagcaagttggcttcatacaacaagaagtcaacgatctcttcccgagaaatccagaccgccgtccgattgatccttcccggagagctttccaagcacgccatttcggagggaaccaagtcggtcaccaagttctcttcctccaagtagagtgccggtccctctggtttcttctttctttttttacatgacctgtcgatatctttgagctctttgctattgataccacagtgtgcccatctctcccggaccctctctttactggaagcttttaagttttacctctaccttttgttgttaataatatgaacatttatgtgtaatctatttcaatgtctagatctagacatgaatgtgagaagacttgattgagacagtggtgtccggtaacagctcggtataaatcgtgttcgtcatatctgaagtcgatcgggcatgatcgataaacgttctgcaaaacccgcaaatctcacgtgaattgttacgagcaaatcatttggatatttatgatgtacaattacttctatatgttgaatgtcatcttttcttcttgttgtgtgttaagcttgggcttgcgattcctgctgcatggcgacaatctgagccaaacgcgaagacaagagaggacatgccctgatcaaccgctgagaaacgggtagctctagtggatgacagattcgtattcacgaacctcgagtttcttcttctcagatcttgtcgagagatctgcaagcgtcttttccacacgtacgctggtagtgtttgatacaaaggataaaggagaggaataagagtggaaggcaaggtcagtcctgatgattacatgctcatcaacggaaaaaaagacaagaatatgcagactgacatctcgctgttaatgaattccagtcgtttttccacgttcgatttggcctcagcctgttcttgcttgaccaagctgggtccaatcattttgtagatagtattgtgaggtttaagcacggcaaactccttatgcatgccatgaagtcgttgcagtcaaacagagataaatcaaagatcagtgacactcgtacacaagatcgttgtcatcaatctgtaaaactcgcctttagtacaccttcattctccgacttctgactgtctagacgttggcgagcttccacagcatttgatagatctttgtcccccaaacgtagtggatttacccggatagcaacacacagaatagcattttgtaagatgcatcatgtcactagccaaccaccattaaaaaaaagaggcaacactaaccagtctgcagtttttgaaactcgatggtagactcttctagccgactctctaaagactttgtactcgacattaccgctcgtgaactaatagaggatggatgccggaagatgatgacgatcaacaagtctgaagagaaggagcgacaacgaatagcaagagttgtgtaaccggccaggtgaatgttacatacacgtgacctgtgatctgacctcggccgacagctgccgatcaaatcggagccgagattagatagcgaatttttggccgaatttttcggagctccttcgaaactctctgggaatgtttagcaaacaaatatcgtctatttgacacacatccaacatacgtccaacacacatacattctcacaacctcgtagtctgtaccagtgatcgcgagatagcaagaatttcagtggggtctcctgattggtctgttcacccaagtttgattggtatgtgggtcaatttctcacacttctgaaattgaccgatgtggactgatgactcgttcaacatggttcgttttgactcctccggacacaagtcataaatagatcgccttttttgagcgtgccacccacccaactttcgtttacttcgacaagtcgtatagtgacttgcaatgaccgccgcaaaagcatcatccttagcagaagagagggatctcgagagtggatccttgaaggcagtctcgggcagcctgacagcctcgaatctgattcttattgtatgtctttatctcacaattcacttttgcgacgcgcttcgtccgcacacttgagctcatacctgatcacctccttgtttttcgaatgttcacctgcctgaacggaaacctaatgacagtttgccgtcagcttgaccatgattctcaatattatgaagtaagtccatccaactatctacctctccgtcttttactcttcacatgattcctcagcgccgctaacgccgcagcattgctccttttccatccttcatgtctcctttctgctagtaacacatccatcaacgtcgcattaccatctatcgccgaagaactcggcatatcccaagccgatctccaatggccagtcaccgcctacgcccttgctttcgttcgtctccacacttacattcttgaaggtctgtttgacgatcgttatctgatgtcatttcacatattatcgttctagggatgcctgctgttgctttggggtaagctggcagacttatatggaagaaaatatgcctacctaggagggatcgcatgcttctgtatctttgtacgcacatcggggttctccgtttcccgtttagcggaagactgctttgatggataatctaacgacaccgcggtttcacagaacatagcggctgccctttcccaatctctcatacaaatctcaatctttcgagccctccaggtatgtccatagacctttgtcactcaagaggtcacctcccaactgatgtcgttcttctctcttctcttttccgtacactcgggattttgatggaaactcatagggtgtaggcgcagcagcatccgttcccgccgctgccggaatcatcacggagaccttcccacctggtactcgtgctcggtcgctcgccttcgcttgtttctcggctggagctcctatcggttctggctttggttcaatctttggaggtacgctcgcggctcttacttctgtttcttccttaaaatttattagactcgcgaacattgattgagcaagttggttttcacgttttaatctgaattgccaaccctaggtgtctttacacaatattcgcctgcgtcctggagaggtgtgttttggttcacggccggtatctccgttatcccttgtgagtacttgctaccttgatagataacagttcgacttattcgttgaaaaatagatggaattatcagctgattgtttcaacgattcgtcttgaacagtcgccctaggtagtatcttcattccaaggatcaggttagacccaacccgagacaagcgagtggactggcttgggggtctgctttctacatctgggttaacccttcttgtctttgccttgagctctggaccctctgcttctaatggctggaagactccctgtaagatttattataaatttcttggtctgcgtcgaaatcattttcatctgtcatcaggcttcttacatttgaaaatccttcactttgactttcgcattcgattcgattcctgttttctctagatgttcttgccactctggttctctccatcttattaattggagctttcatagcttgggaagatcttttggtgcgatcttcgagattcagtctgaaaccgttgatgccattggagatttggactcggggtcggttggccgtcaatttggccgttgtatttgtcggatggtgtgctttccagccgatgctttaccacgctacacttgtgaggctcctcttcactcgtctgtctcatgtctttgcaaagtggatgctgaccgacggagcatcatactgcttcgattcactatctcggcctcttttgcctttagttcttccaagattaccaaggtctatctccaatcctgacaatgattcgattccttcctacagcagtgtccggcattatggtgtgcttggtgttcacactggtcgtaccttacgtttacggctggaccttgctcaccatcgggtctctaggagcatcggtaagtctggcttgcgcttccatcgcatgatgtagctttcctcaaagtccaactctactaactccctgttctattctctttttcagttcgccgccatgtgcatggcgctttgccggcctgaggatccgtactggcaatgggctttccctgccatgatcattagcgtttttggcgctgatttcatctttgctacgagctcaatttagtaagtcgtctttttctcagaaacctttcatagagttcattgctgtagctctccttcataatctcgtcttgagcatcatctgagatatcatctgacgatacaagattatttccaccttgatttatagcgtctcaagcattgctaaacctagtgaacaatcactcgctgcgggaatgcttcaagtcatgatgcaggttcgtcatacacctcttctgaatcctttctatcttttgtatcgagaaagagaatagtcattgacatcaatgtttacctctctcgaaccgtgttttcatctctagcttggggtggcaattggactggctgtgactggagtggtgaacgatgcagtggcttccaagtcatccatatcactaggtgtcatacccgatagtggcaacagtaacatccctaaggagtctcttctcgaaggtcttcaagctgcccagttagtatgattttctttcttgttccttgaaccgcgtgttcagttgcgttctatcttatatctgagcctgaatgtaaactgactactcaaccttctgattccttgtgctgttactaggtggactgctttcgcctttggcatgatcggtgtgatactcacagtcaccctacttcgtcctattcgagtcataggcgttcgacgaaccagtaaatcgagatcggcttcagaaaagccggatgctgtagaacataaggagacaagcgagcgcgatggagagaagcctctacattcagccgcagaatcgacagaaactgttgtcatctcgagggatgagatacctgtgttgggtatggttctgaacgaaaaggagggacaagaggtcaaggaatcggtgtattatcaaaaatagagacaaaatagactataataacataaaaccagctacggaagctgtctccactcttttcttttcaatccctctcataccataattattacacacttcctgggccatagtattgatgataaatgaatttaagaagttctggtttagatcgttgaagtggactgtagtgagtgatcacacgatgggtagtcacccttccaccgctgatttccatatacttacttgcttactcggccactcggttattcttccctctttcgacatccaccagatcaagaaattacgatgtcgggacccaacaccttccgacctgttctaaacccgttcttgacaaaacagatcgggaagaacaagtttcctctgataatgacggcgcgtgaagctttgtctttgtccgttcacggccatcctccttacctgctttgaaggttctcaatacgtctcatccgtttcactaacgcgatcctgtgctttcttcgtgatcatcaacagaggtcgttcgagaaaccagcttgatacaatagatacttcttcatcaagctctacaataatgcgtacgtcttcagaccgtgtcgagtctgatttgtccgctggatttcatgaggatggacaacctggagagtgagttgagatagaaaggaattcagattctgactgttactcttgcgtctgggactcgaacggaactttggacctgtataacaaacagctataaaagtcgataaaccaccttcaccgcctccgactgccgaaggaatgttcaagctggacgcagtcaccggaactctccccattaaaggcgatcaatcttggggatacacgctggacaaggaaatgaaagaggttcgtacttcctgttatcttttcaatctgttagcccggtcatgagagcagtagcttgaactgttttctctgtacatctgtcttgcagttttatatgttgaaagcggcagtagcaaaggagcggtataatgcaaagttggaagtatggcggaacggattgtccgccgtggatcggaagaacttgaagaaggtagaccccgaagtgaacaagttgatcattgcaagaccctcaaaatcagcatcgtgtgagttattgtcacacattttcactggcgtctcctagaaaagaagatcaagaaacaaatttccatcgacatcgctctatgtaaatctttcgatgatgtacgcatgtactaatcccatctttgactctctggcgccgccgttcgaacattggcagtgggtataccgtcgctcgatgtttcttcggatatctacccagattccaactcggattatttggtcgataacgtttcgccaaagtttgaagaaattgaggctgaagaacaaagcgaaatcaagttgtcgagccaggcgccatctaccacagaactaaaaaagcaagtgattgcttccatattggaaaccgaagaacttgcgagacaatctccagacgccaatttggcggatactgaaccaagacctgcatcatacctgacatatcgacatctgctagacgggaaagtcgggaaacgatgaagatgccatctatgttgctcagatgaattgttcctctgaagcaacgctttctcgtatctagacatctagaagccctctcttctggccaccgtaaccttcctgcttaacatttagttgattatatcctgctgttccctcacacttgcacatacgcatccctcttctcttcattctttgttctggccatattcttcacctgcacttctgctctctagctataccttatatatgtgtacaaacggccatttctatcatgatatgacaacatcacatttacaatctcccacattctcaagtacatccaaactctaatccacagtaggctgggattttctacgcgcaaagacgtgatagtggggaagcaactgcacgcgtgtattcgatgagtaagagcaacgacggtcaggttctgaaagtgggcaaagttcacatgacgacatcaacgaaccttgacgctctgaagccttggcgggttgaggaactgatatagaaggggagaacatatatccaaatgcaagagagaaatatcgttagtaccttgtgaaatacgttttgtttgaaaggcttatccttaaagatattcgagattcataaccacccacccagatagtttctgtttcgggccatataaaagaagcaagtcgaatccatatcagccaggatagaacaacgacagcaaagaaggacgaagatgtcgagaaggagcacgcaccgcaatcatcaggattccatctatcgttaacaaacattcccatttcccaacggacatcaccttccttccctctgatccctcccttctcatcgccctccactccggtaaaccctgtgacgccatcctgttcaatctcgggtgtcatttgagatttggaaacgaggggtaagggagtccagatcaagaaatgggtgaccgatcgaggtgtggagtaaggccagtctgtatatatcaatcattataacataatcaacaaataatttgaggaagacatagtatgaaaacggcagaatataccattcgcaatgatacaaaatcgagattctggagtagaccgatcgaaggactcgtccggtttgggtgaagacttgtccacgaaaaagactcgcttattaagaaggtaagattctgtggtacggatgaatttcgacaagggaacatacaaactccccggcgatacaggacgtggtcagtcaaagacgtggatcgattcatttatgtgatacgtctaggaggagcgtgagtaagcttttgatatcccccttttcaaacgcctctctccttctcctctcttcactcctcggatagaaagcggtttcgattacgaaaccaaaacaaaagtggtgcaaggagaagaagaaaccagtcgaaagaatagagagtaacaaacccgttgatcctccaaaatcagccttcatcttcaatgaccactcgtcatagatcttctgtagttgcttagggcgtttcaagagcgccaagtccctgtgtcatttgatgtgcatccaaccagccaccatgtacgagagacaatagtccggagtgttttagatctcgatcatctcactcaaagaggaagaagaaagatctccccacccgatcttgataatttttttgagttcctcccaggtgaacatcaccgggtaagattcaatatcctccttggtcggtaatccttcgatgtcagaaggagcaggatgaagctttgggccaaacttgatcgtggacgaataaggtagcgatttcgagatcgtcattgtttctgttgatgatgggtgggaaacagcgcatgatgaatatagaacttgtccacattgaagagtttaaggttagtaaccggtggaagccagggtgctcgcgaagtaagttcattcaagatacagttgagtttgatggaagaattggtaatgaagaagaatgaagagatagatagcaaagacacagagccatagacaatgataatctagcagaaacaagggataaagggaagagctgatggaacaagaatcagatgaaccacactctgattgaaaaaatcctacagggacaaaaggaagagaataacgctgatgctttttaatctacccctcactcatttaagcataaagatcatcatctccctcctcggcctggaaagcagcattgccacctgcagtagctgcgtcagcccctccgctgggcgctcctccctcaacacctccctcggggaacttgaaagacgagccaaacgatctcgactgctgaagcgtctgggcgaacatctcgtaccgtcggatatcggcatcggaaacggatcgtcgagcgtacatcatggcctcctcaaagtgagctcgggtgatctcgggaacggggtcctcctcatcctcagcttcaggggcggcgctatcctccataacatcgtccgcaccttcggcctccttggcggccttctccctctcccgtcggatgtcgaactcgatagactctcggatggcaagcttggaggctctctgacagatctcagtcagatcggcaccggagaaaccgtgagtggccttagccaagaaagttaaatcgacgttatccgcaatgggagacttcttgagagtagccttgagaatagaaattcgagaaggctcatcaggaagaggaatgtagatgagctgatcaagacgtcccggtcggagaagagcaggatcgagctgatcaggtctgttggtagctccgatgatgaacacgttctttttgcttccaactccatccatctcagtctgtgatgaggtgccagtgacgaaattagcatgagcgatacaagggacattgacgacacaaaggatagacgtactagaatctggttgagaactcggtcgccggcacctccagcatctcctccagagcttcctcctcgggacttggcgatggaatccaactcatcgaagaacatgacacaaggggcagcagcacgagctttgtcgaagacatctcggacgtttgcctcagactctccgaaccacatagtaagaagttctggacccttaatagagataaagttagcctggcactcgttggcgatagccttggcaagcaaggtctttccggttcccggcggaccgtagaaaagaacacccttggaaggagacattccgtatttgaggaacttttcggggtgctcgacagggtactgaacagtctcctgcaactcctgtttgaccttctccaaccctccgatatcatcccacttgacattgggaacctcgaccacagtctctcgaagagcagaggggttggaaacaccaagagcaaatcggaagttttccatagtaacaccaagggagtcaaggacttcagcgtcgatagtatccctagaacaaacatataaaatctggtgagagtctgacatcttgtaattataagcaccatcatggagactcactcatccaaatcaatgagatccatcttctctcgaatctgctgcatagcagcttcagagcaaagagaggccatatccgctccaacatagccgtgagtatcggcggcaatctaggataaatgaagactatcagcgtcgagataggaatcaacgaaacttggatgagcgagccttgactcacttgttcaagatcaacatcatcgccaagcttcatattcttagtgtgaattcgaaggatctcaagtcgtccagtgggatcagggattccaatatcaacctctcgatcgaatcgaccgaatcgtcggagagcaggatctatagagttgggtcggttggtagcagccatgacgacaacgttggatcgggccttgagtccgtccataagggtgagcagctgagacacaactcgtcgctcgacttctccgttggtctgatgaagatgacgtaggtgaacaattgtaaggatgtcagttgcaatctatgtttatgccaacttgatcagaatgtgatcgcaccttgtctcgcttaggtgcaatagaatcgatctcatcaatgaagatgatagccgggctgttcttctcggcctcctcgaaagccttcctcaaattactttcagactctccagccatcttcgacatgatttctggac

SEQ ID NO: 3128 - DNA, 1354 bp, Xanthophyllomyces dendrorhous
cgacatgatttctggaccgttgatcaaaaagaagaaagctccagtctcgttggcaacagctcgcgccatgagcgttttacccgttcctggaggtccaaacataaggatacctcgtgggggcttgataccgattgacttgaaaagctgagggtgtcgaaggggaagctcgacaagctctcgaatttgagccatctaggaacaagatgtaaggagtaagattaataatcgagacaatagcatgattgacatagatcaaagattaccaacctgctttcggcaacctccaatatcgtcataaccaacatcggccaagttgttctcctcgtcctcacgctttacaggctctccctctaaaacccgtgcaagttgagcgtaaagaattagtcagtttgtccagcacgacatgaaatcgactctctatacaggcataagacacataccagtgtgaatgacggtatcctgagcgacgatacaaaactcagagggatcggtctcgatgaccttgaactcaacagttcgcatacctcctcgaacgaggaaagtgtctccctttcgaacaggtcggtaggctagtagggtacacagatatcagatatggttgtagatactacagcgtgccagaaatatgacttaccctcaaggaagtaaggcttgagataaacctcgaacaagtttccagtgagacctgaggaggaagaagcagtatatggttttaactgatagacccgagatgatctcaaaacacgacaaagaatacataccctcaaccgagtcatcgaacggaaggatgtgaacacgctttccgtacttgatgtcaaggcacgcgtgaacgttgcagagatctccaagcttaactcggaggttgtttcgggcgactgtaagaaagaattcgaaggtaagaatgaggcctacttagaaaacaacacacgtcattgattcaggtcttacccttgttcatctggatctttccctcatcaacatcttcgctcgagagacaaataagaacggtatccttgcgcttctttccccgaacgatgacagtgtctcctcggaagaacccaagggtttccatagtggcggggtttagtgtgcagacagagctagagacaaccatggaatcagctagtttcttttacttatatttacccaaataggcgtctaactcacttatcatcgcctaaaaagaagggagaacagaaagccaacctatcaatcagtacatgcaagaagagaaagatggaaaagaaagcagttgagatcgaaaccccgagaaaaaaatgcacctgtcgattcttggacaatcaatcggttagggctaacacgccaaacaacaagcaaaaccacacgtcaagac

SEQ ID NO: 3129 - DNA, 14873 bp, Xanthophyllomyces dendrorhous
caatttttactcgttggaaacaaatttgttgagaagtttgagccgacctctttttgggtcgcaagatagaagtggcgaggtcatctgcgttctgggcggcggcagcgtcagccatgatatagatagagatggggggttgggtaggtttctgtttttggtatctaattgggttctttgtttcgcgtacgaagaaggatgtctaactctcaaagctgagcagccaaaatacgacaaagacaaggcagaggaagaagtgatgggtggtggtgaggaggaggagaggaaggaaaggaagaagtgttctgttctttgatgagcagagatgagatcgacgccttccacgtcgagactgggaggattacataatcgttgtgatcacgtgtttatggctgtgttcgatcgcaacctgaagtagcctcgatcgtcatcaaccaaatgaagccttctgagaaaagaactcgagagttcatctatcgggatataaaatcggccaggcagttgatgagatttgaatgttaggtcgaatggctgacgatatatctcattcatttgttcttttgggactttcgacctctagaaactctgttattcagtcttgcgctcgcggactgaattttcatcttaaaaagcattttcttgcacgtcccctttgaacgtgcgctgctctacccttcactgtcctcttagtttctcttatttgtaagaataggtctcaggtaggtttgtgttgttcttttcaggttaacagttttgtagacctgagcagcttatgtaccggcagacgtccttctagtcttcttctagttgttcttcctcccttctaggtttctcacgacatctgtcaaaatcatatcatcgtttcctctggcacaccatgagcggcgcgtatgactatatgttcgttaattatcatggtttgctggccaaatttttatgatctgtccatcgggagcaatctagacgacattggggaattacataatcagtcattccgtcattatcagactttatctagtccgattgaccgtccgctctactccctttatttgtatctgttctgtctgctcacatctacaccagagaaaaacataaacacaacctcctacgatttgaacagctttttcgcttaactgcgaagagtggagtggatggagaggtcggagaagaacagaaggcagcagagctgctagagttcccttgacggtcgtttgtcgttgtcttatcttatctatgaataggctcttgtattgacccatcccttgtccataccatgcttcttctcatcgtcttggccaggaaccctctatcgagagtgtcttttttgctgataaaactaagctcaatagcacaaaatctcgggtgtatacagtcttgttcaacaaaatgataacgacaaaagagatcaaacaaagcattgatcttctctctgccgagtcgagttttaatctcgctatccatgtgatattcgtttgatggttgaacagcgctcgacccttgttctctatttatcttttcgatcctatccatcctgtcaacccctgttccacattgctgcaccatgtttgtgctcgagaggcttcttatataacgtggtcttggaacatcatgatcgcctgcgtcgcagctctcctttggtgtatcttcattccttgacaaaaacacttgtccgtctttcgggctggaagctgaaaaccgacgcaactcaagactgtagccgctctacatcaacaaatacttgtgttctgtggggtaaaaattggcgcattgtcgtcttgtaagaccggaatattcctctccttcgtacgttgaggaggcttcgaaagagcggtcgagcctcccgtttgctcggcagcgcttccattctaatccttcctcaagatttccacatagcggtgtcaaagataagcacagagctggcttccggattgatcatcctggctgatgctgtcggactcgaaagccgatgattgtagatttctaccgagtttcatgcggacttttcgcttggacaagtgagaaatagacattgcaccatactttgtacggaaacactatccagcacaatataagtacaggaagtcacgtaagcaggttatagggtgataacgcaacttcagagtcggtccaatgtacagaagaaacagcgatggagctagagtacacgacatccacaagtacaacaagaaagctagaacggaatgggaatgtgttcctacggttgaaatggactggttgataaggaaaatgacaactgcgacatgttcaaggggagagaaaacatatccccatcaggtgaattgatagagaactggagatcagaaggacttgcgtgagtttgtagtgtttatctcgagagtgtatacagataaacagagactagatgaaaataggcagcaaacgaaccttttctgacaagcccactgagatcacgttcaccccatcgagcccggtcacacaacatagccatcgcgagtgcagctagtagcccatcttcaaacgggatgtacctcggcacgcctggtttcgatcgaagggagatatacatggaggatagacctctgggcagaacgtacagcgccaattcaggtcgacggccctggacgaaggaattgaacagagaaaacaaaatgcagcggagacttgttcagaacaggtaatcacaacggaaacgatatgaatctgctcacctttttctcaaagagaagagagaagtgtgtcaagaagccggccagccagaagtaccgtttggagttgataaatcggcgcgaccagcctttcgtatatggatatacgaccggctgcaaacaaattacacctggttgacgaacaacaggtttgaattgatcatcatgtcgtgattggaaggtgagtcaattgacgagctatcatgaggccatgtctgctctagctgtgacagagactgaccatggtatataacgacaaacatagagagaaatgttccactacgcatggttccctggaggtaaagattgaaggagagcccttcagatcagttggttgggcggtgaaacaacagagagacgtagttagaaatataccttgactcctctccaaagcgttaagcccacctccctccagttgataccaggctttcttcgctccttaatggcgtacctctccttctccttctctccgttccatccgtctttctcgggcagaatttccaatgtaggagttgcgctgacttggaacaactgggctcgcttaaggatcagcggaggaatcagatgcaaggcagagtatatcgggagcatatgttggaacaccatgaagaatcggttcacaagcataggagtacaatgatcgttcatcggatggaggattgctctgtggtttaaaggatttaacactagtgctgcgtcaaggatctgagaataacggaagaagggtgagattaaaatggtcggacgaacgcaggcatgcaacttcccatttctccttgaacaaccccgttcgtagccttctcaagcagttcctcgatcgtctttcttgccaaaggtgtcaaccctttgcgtctggctaacaatttgtgtagttgatccgctgggatagtccctgtattaacgagagagccttgaataatccgagcctcgacaggaccttggaatgcgccgttgatgaaggatacgtatgaacggggaagccgttcaggtgaaacctaaggtttgtcaaagtggtagaatagatggcacacattaaaagattgatacttcaaaataacaaaagtagtgacgcacgatccagttttgcataatctgtcccgcacacaatctatcggacaaagttgaaatatcaatatggtaattcagactcacagaattggcatgtttgtcagggatatgacttacccgaaaagaatcaattcacctcctggaacctttattccaaaacgtctgctgacgccgttccaaactccttctagacctcgaaccagtatttgccttcgtgaggtaatgccgagatacgagagcgttctctgtcagttgattctttcaagaagactatctcgaagggtttggcaggaaatatgtacatactcaatcacacttctccgctcccgctctttcctttccaaccagtagattgcaaaaccagccccgactgctccagcaaatgcggcatgccatcttcgctctccagcccaatcatcataagctatctccggtgggccaaaaccaggctcgtcgctcaccaaagtgtctagcccatcctctaacatctcgaggtaagactccgatcgactagtggatcggcgcagcgaacgaagagagtgggcgaaacgtttcttcaagtaggatgctgggggagatagtcggagggtgtgaagaatgagtgtatgaagaagagtgaaggttgagaaaagtagagaaagtcggagagcaggtttgtaaaacaaggaacgaattaagagggaaggttgaaattttctgcagagcgttgatggaacggccggccaaccaaccgaccaaccaaccaacagacagtctagtttagtgtctgaaggatctccagcgaaacaaggattggagctaggctttcaaacagaccttgttcgtaagcatctgaatagatacagaatcaagtttactccagctctaagcccataggcggacaggaagctacctgatcaccctcgtttccccaagggccaaaggacgaggatcagagatgaccaagacaaggcttttgaacgagacagagtggttgcgctcacggatagacagtctgacgctcaacaccatcactctttcccaatctcctggtctttttgggccttctccagctggcctccagacaaccccagtgacaccttgaagcaactcctttgcctcacttcgcctttgttcgatccgaagcattcggtcgcgcgctctgatttcagccaagcgagcatctgcttcctgctctgcgttcaagaccaaagatgatgagagagcagagtattctaggacaggagatgatagagttgagggatcgttcgagggaggggaggatgctagagagaagactgattgtttagcagtggagctcgaagtagaagctagaggagtagaagtctttgtgaacgaatatgccgatggcgacggaagagctgccagcgagagaaaagtgtcaagagatgccaaagataatgttcgtcgtatatgagcagcagctctgaaaggagaaaactccagatcaagtcaacttctagatgaaattttacccaaccgacggccaatgatctacaactcactcggataggttgggcgttcccgggtctgatttacctccttgagcttcgtaatcccattttgcttgttcattctcctcgtatctatagcgcgttgcatcatcacaagaggcaaatgtttaggcgagtcattcgatcatgagagaacccttcaaaaacggacgactgacgaaataggtttgagtggagtaagaccgagggtgctgaacctgactctagagggtgacctccgagggggaggaatttcagagttttctggaggtgccataggaatctgaatggaccattcaccagaggaatcttactacccagacgtgtagaaaagacagatgccaaagtaggcaagaaagattgaatagatcgttgttggtagaaagttgtttgttatcatcggatcagtccgggtgagagtataaccgagactgtattttgtggggaagtcttggttggggtaaatcaccatggtaacgtccagaaacaccgtcgctctgtagcctatgtgtatatgcttatatgcatcatcatcatcatcatcagccatacaaatacaaaaacacaactagacgatattcattctagaaaggatgctgttccatttgatgttgaccaaaatatgagggagagaatataatataccaaagagcggaggacaaaaaaaggagtgaaatcctgaatcgatcattctagtgtcccatctctatgcgatcgtttgtctgattaagctctgccgaacgtcctctgcataaactcctttctgaatgcttccttaccggtggtctcgacaacgacctcgatgccgctctgagaaacatcagacttaatctcatcagacgactttggcttgatccctccgtgtgttctgatcgctagatcggcctcctccgtccctctgtagcaagtaaaagtgagaaagataacaacatacaaaacagagcattagatgaacgacccgctttgtcatgtaatcaagagtaggtcaaaggaaatcccaataacagactgaccgtcgatcgatcacacacatccctctggtccactctccttttcgctcaacctcaaactttcttcttcgaacgctaaatccgctgtctcctctggcaagcgctaccgcaacccaaacgaccattgggtcatgcatctccatctcgtccggcaagcctaggctactatagatctccttgactcgaggaaggaatgccgaggtatacacgtccaccggagattcaggcgaaggtaggagtaattccgggaaagggaccgcgtgaggagttgtgacgtcgagaggaagaattgtgaggtggaaaggatgagaagaccgggaaggagaagaggcgtcaaaaatgtatgctccggcatacggatcagcgtaaagattgaattcggccgaaggagaggtgtctttggtggagatgaagaagctaatgttagttgtctggatagaaaaagatggcagagaaagtcatttcttcatgactcacttccaggaacgtccaaagcggctcccatccatacgacttgcttgaccttcgtaaagatctccgggttggccttgtgtgccaatgccaggttggtcactgttcatacagcaagagcatgtcaatctctgatcgaagactttggacataattatacgtagatacgtagactcaatagattaggagaacaagacagagaagtcatagcttacaaggcccaagagctacaatagtgaccgtgttagcgacttccttctccaagacctcgaggataaggtccgaggaagccttagatgatagctcgagagaagcggggaagtatgacggaggaggtataagctctgggcgaatctcggagatgttggagagtccatctggtccatgctgcgagataaagtgtgcgtataaattataaagaacacagcgaccaagaggaacgataaatgacctgaaagtcagctccagtgatcactttccatcttctgacatagatctccgtgcgacttacaaagtaggaggcggtggcaaactctccgtcaataggaagtcgtgctccttccttcgatacctggatcttttgacgctgagctcgaacgagtccaggccatctggtttccctcaaagtcggctcgacggtctctagttgccgctccatcacatggaacgtcttgatcaaatttttgtatacatgttcgatcgttgtgtttccgaacacgggtgttaaagcgagaatgtcgagttcagaagaggcaagtgcgtagatgagagcaagtgcgtcatccactccgatatcgctagataatcacgtataaaaggagagataggtaagctatggctctgtatgtgtgtgtctagacatgagatcttgacggggaaaaagagagagaaacatctcttacagatcaatgatagtctttgacatggtaagggaagaaaaacgatatgaaaatagcagatagcagatggtagatgggtgatcagaagcaatgaaaggagatgaaagagagtgtgagagacgagaaggtgagaatagataacggattccttctttacgccaaagttgttacactttaatcggtcacacccccgcacgtccggttgacaaatctccgccgaacttctcgctctgttttctcatccctccgtgatccacggaggacaacatctaagggctgatcatttggaaatcatgaagacaagacaagacaacatgtgatagagctagtatgatccatactatgaccaacaagggagagaataaaatcgatcggctctgttagatgagctgtttggaagttttacactattctatgtgtcttttcttgatcgcctacaaagtgaacacaacacggatctagttaggtcgagcactgattgtaaacaagacctcctttccttttccttttttctttcctccggacatcggcggaggcgtcacgctcacgtccggcgtgttgcttccagagcctgtcggcgacgatccccaggacgacactggtgcagatttctctccggtgattcgcttgattgtttctgcccgggcacttgggttcgaaaacagagccttcttccgtgcggccagctcggcagcagccgagttggtctgcaacgacgggaacgcagcgtgtgagaccggcttgggggctttggccggtgttcgggagcccgtgccagacgtcgaagacgcatagtttacagagacgggcgcaggtcgggatgaagatgctgacgaggccacgggaggtggtaacgcagggaatctatctgaagacgtcgatgatttttggctactggcccatgcggttgaaccaggcacagtctttgcattcgttggcgtcggccgtgctcgagaagcggacaggttgctagccaggcttggcgggttacccgctgagggccgagagttagaggacaaagcctgtggggcagggaagtcggacgcataattaattgctccaggcttgatcacctgtcgtttcggagcagccggaggtcgtagagtggcttctgcgctctcgactcgatcccagacctgtcgagacgaatgacttgcagtgttctgcttgactttgagagccttagcgttgacgttgccgttaacggcatgggtacggtagcttgaaccggagccacccataggctgatcgattgaggggaaatctcgggagtactacgggtttgaacgcaaagaatgttagtgtgagctgcaaagctttctggaagcaagaactgcatgacaccctagagactgacctcgttaccccatagttgaatctctttgttcagggtcttttgccgatcctcgtcggttgagaggagtaaggacgcaaccccgctagcaatatccattgtcagactgacatccctatcaagaatgttgaagattgtgtctagtacgtctcggggtccagcctggccggttttgtaggcctgtacagatgaagtgaacgctgcgtttttagcgtccgatcgacccaccaagttgtacaccctggtcatgaaagtagagtgtttcctgtgtatattgatacattattattatggttgtttgcaaatatttcacaggcagtagaaaggtaatatattgtcagttgagcaaccaaatgggacgtcccactgtctcgtccgagcacgctacttgtgaatttacgctgatagcggaaaagagatatatatgatagcccgtacctttcagcttcgctcatcgcacctcctccattggaagaggacccagcaccggcctcgcccccagtcagatcggcgccaaacccagcccttctagacgacttgttgtttggcacaccggccgttccatcgaaagttcctggatcgtagagcgcccgtccactggcatccggtccatttccacgaccgcctctggatccgtttcgaccgccacctcgacctcctcggccgttggagccgttggaaccagagtgggacgaccgagggtcctcgaaggacattgagacttggatgcgacgagccaaggcaagatcccgagaagtcatttgagaggcatgctgatgacagtcggcagggagcgcgtcaacctttgttcttcgtcttggatgaacaacagcaagaatggttgacagctagactaacctctgagacctgatgaactttgagatccatctctgaagcgaacacaacaaatttcttctcctgacactgaggatcataacagggatagtgttgagtgctgtggtcgaagtgagattccagaaagaagaacgattgcatcaggagatcgcatccagtgaagaaaaaaaaagctgatcgaacaagtgatgcatacacaaagtgctgttcgagtttatcatatgtttggaaactgagagaattgagataagaacatcagggccgaaagcactcggcgtgagtagcttgaacggacagaatttgaccgaatgatgggaaaaagagagagagggctgactattgatccctgataccagcctgtttgcacaagaagcagtcctcatggttttccttcaaatgtttcaacagatcatctcccgcaaagaagcactcgtgacaaaactcgcacatcggatgaacacccatttctccagtgatttccattccctggggcagctggggaggtttcatccgacggggaactctagaaggcagatgatgggccaacaaagctggcgggtagatctcttgctcatgagcaaacaccttcttgtgcttgacacatacgtcgctacacagttgaggcacagatttccaaatcagcttttgtgtttacaactctgagaggcttatgcagcgtttcaaaaggagaaaacaacgatgagcggaactaaccataagaggtatccgttgtgcgtcttgtcgacgtgtcgacgaagatccatccatcctttcgcgatataatcgcatgactctgacggacagttgaatctcaggagaagcaaggactcttccatctggtgaataccacggcagacgataagagatcgtcagttaccgtgtctcggtccgatgcacatctaggtactttgtggaagggaggagggggagaatgagaagaaacactgactacttcgtcgtctgagaaatagatcctcagcttgtcatctctgaattcggttcgagacatcttctcgaacaacgtatcgggagaccgtgtgaaaaatacatctgggttatctgcctatatcatgagcatacatataacacgagtgtcagcttgaccagctggaaactaaaaagatcactaatcaagtccctctgcctcgaatttgtatgggaaagagcagcatacgtcgcgcagatcgccacgaacgaagggaaagctttgggaaggagatacatagcaagtaggccggcgtaccttgcagtaggtgcattcagtctttttgtacagtgccctcagtcggagagagcaaacatgacacgttctctacaaacatgatacaggttcgtccaagtgttccgtcaagtgtttccgttgacaaccacgattgagttgaataacgaaaccccccgaaatagataagttgctattgttcagtacgaagctttacagaatggctggttgaggttacagcataaatagacgatcaaacgaaaagacaaacatggttgcaaactccgaccgcatagtatttgaaaggttcggcacagataaagcagaggtcttcgtctctctcgacgctcccattcgaggattcgacctgttgttgagcgggaagactcgactcaacggaggaaaccgatgatgaggtgtatgaaggagagggagaaggaaggtctggccgacggagcgaggcttgcgagggagcagccgtgttggtgttctcgtccgtcaaagtgcggtttgagcttccggaggatgtgagctttccggagaaattgtatcgtctagaggaagccatcgtctaagagttttcgcgtgtgggtttttttctccttcttttcagagtatatttcgaggatgatttcttgaagactgtcctacaaaaagacggttatgatatcgagagtttttcaaccagaagaaacgatctaaggacgccgaaagaggtagctgaaagcgagggctgaagatgaagagtgttcggagcgatcgatgaactcgagaaggagaaagatagaagaagaaaaaaagaaaaagaaggtgaggagaaagaaatactaaagaaatttggtggaagtcattagagaaagtttgaagaggcattagggaaatcgcttgagaattctattacccagaattgtattcgtcatcgttcgctcttgctatagaatgagcaggacagactgattggaattcatcgatgggttggatcagatcatgatagcttgttggagctcgctatgacctgctgtggctcttcgtggctgtcgataggatacgtagttgatgagttcagacgcacatacgtacagaaatcaactgttgtcaagcattcatgatcttctcttcaaggtctctgatacaaccagggaagcatagaacgacagagagaagtaccgagaaaaaaaaaggtagagaataacggaaaggaaagaaaaagtcgaacaaaatcccacttctctaaatgccttcaattaactcttggaactcgcccgaggcaaccatttccttgagaatgtccaacccgccgatcagctctcctttgacaatgatctgagggaaagctgtcaagttgagagaaagagatatatttaaccatgagaactgcgtttctatcacagccaagcgcacgcaacaggcagaatgggctagttctagactcactgggccagtcgttcttcttcttcattccttcccggacctcgttgtctgaaaagatatcgaaccatccgaattcgacaccctctcctcttaacaccgcggtagcctgtctagagaacccacactggggagcgtccgggtttcccttcatgaacagcatcaccggcgaccggttcatgagcatcgtcagcttctcgtccaacgactggggagcctgcggggacaccgtcgttgtgctcagcggagcagatggagaagaggatgcatgggtggatagagcagcagtcaaagcgggtgcaaccgaacccgagtgtcgggagagtaaagagtgaccctatggtgaccgaagaatgaacgcgctcatcacagtcagtccagtggagttgagagtttgagaaaagtgaccaaggcaggaggaaacccggcaaggcttactcgtagcagaaggaacgtaggaacggcctcgatatcaaacgactcggagatatcaggctgctcttcggcctcgatattgaggaccaagacctggggataattttctgctaacgatttgacaacctgcgaagaaacataccgaaaagacgggtaagcgtatcaggtgagtccgataaatcatctgatttgtcttgctaatactgcgagaaaggcactagaaacacatgtctcgcgagattcaaaacgacgtacttcattcatctctttgcaaacatcagcccatggagcccaaaagttgagaagtgagacccggttaagatcagccgaaaggagatccttgaagtgatcaggcgaggtgacgtcaatgagactgaagaagggcaatgcaaggtgagttggacgagcacaaaggcagaaacagtcgtcaaaaacccctaggttagcacccaaagaccagacttgatacaattaacagatgagaccctcacttttgagacgaagacatggctaccaagatatgttatcgatacaaagcgatggtttgtggtgaaagcagaatgaaaaagatggcggatttgaatctgattagaaagatgaggtgattttttatttatttttattttatttttatttttttttattttttcattattttatcatatcgacaattttgtaataaaccgactacaagaaaatctggtaataccctcaacccccaacatatactcaactcacacagacttcatttacaaactcacagaatggcaaagaaaccaagtctgaagagcgctctcgcaggtcgaaaggttcacgagcagaagattcaggcgaaagaggccaaggagcaggtaagatatctcatgaactgggctccatccatccatccaaccaaccatccatccgttgaacggtatggctcatactcactccaagtctggggaactttctctttttttttgacactctccgtcacgttgaaccactttagagaatatcagatgcgcaggctgcagctgagaaacgagcaaaactcaaagccaaaaagaccatgccattcgaggcagacgactctatccttcttgttggagaaggtatgcctgctcccgcgtcgtctccctacacccatgcgcagatgcgttaacaatctattcctctgctttcttcttgtacataggcaatttttcgttcactctaggtcttctcaaccagcatgtgtttatcgacaagtcaaatcaaattctcgccacttcgttcgactctgaaaccacgtgctacgagaagtacccggatgcatccgccatcgtcagcgccatccgagcgcatggcgtacctgttctcttctctgtcgacgcaaccgatctagaagccacatcagagatcaaatctcgacctggcggttggactcgagtcgtgttcaactttcctcatcttggaacaggcgaaaaggaccaggcgagaaacgttcagttgaaccaggtcatgcttgcaaagtttcttcgttctgtcgcgccgttcttgagcaaaggaccgagtcgaattcctgttgtcgagcctggacatggaaaaggaaaggtgaaagcaaagaaggtgaaggaaaaggatgaagatgagttggagggtgtcagtgatttcgaggaactaggagaaggagaggaaggcgatgaggcctacgcaatcccggtcgagaaggcaagctggaaagttcagaagggtacagtgctggtcactctgagagatgcagttccgtatactctttggtatgttctttctgtcaccctcgttggatttgcgctccattcccattgtcctcccacttggagaatgattgtcagttaaccagatgtgccctttgctcttgctctcaccctcttatccttcctggaaacatccttccattcaaacagggatctaccccgactgttgactaaaccgaagcctcttcctccgcttcaca

SEQ ID NO: 3130 - DNA, 23572 bp, Xanthophyllomyces dendrorhous
gacgcttcccgctactcaacctcaataccgaatccttcgctctttcgctttccaccctactctctatcctggttactctcaccgacgaaccatcggcttcaaagagggtctttcggcctcagccaacgaagagattgaggaccgtggaggaggtagaacatgggaggctgaagtagtcgaggagagcttgaacaagaagccaacgggcacagacgaagaagaggcaagagagagaaaagagcgtgtcgagaagagaagagaagagctcagagaggagaaggacaaaaagaagagcagaagaggaaacggttacaaagatcacaggccaaagtggagcgccccaggacaaggtgatgaaggatggcagatctgatttcataacgttgtctccttacatatttgtctcaactcgtgtcggaaaagaagaaaagtcaagaggaaagcaaaaacacacacgtctgtgcacacgtcactatatacactgtgaaacacccaactggaacaaattttgtgataacaaggctatagctacaggcatttaaaatggaaagagacgttctgtagatcattcctctctagcgcattccttctcccaatccaacggagtcaccttctctactgctttttggaatgcctcgaacgtacataactctgggacacccgtcaaatggttctcgggctgagcgcaggccgggagagcaagcggcttgttctggtatctgaatcgaacatctgaaacacagaaagcacgcacattcagaaaacgagatgaaacacaaacatgttcagcgccttagcctttctcgagcggtagccagggaaacttacaatgacgaggaggcgtgggtttagtccagcgagagaataatgtcgtaggctcaggaggggtcgagaacaactcgacagacacatgagcggtgaagtctttcaaacagaacaaagaagtaaattagcctccatacaggcgcagaagcaagcgcaggatggcatgagcaatcgtatagatcggtcactcaccaggccatctagcattttgtatgggatatagaaatcaaataagagagaacagcagtcgtcatcaagctttgctcttgcctaaaagggaaaaagaacaattcgctatgtaggcagccgatataaagcgcacctattgtcaaacactcccaaggtagccaacatactagctagcgttgtatcatggcaagccagcacagccatcttgacgctatccttctttcctgctactttgtcagccatctcgtgttggagatctgatagtaatcgctagatagatagatagatagatacaagaaattaagcctggttataagctgacattctggaaaaagaccgcgtaacttactcctgatgctaatgttcgaacttcgttagaggtcaatactccgccaaaccattctgagactatggcacgctcctgagagatcctcaacatatcggttaatcacaagtttcaccataggtaagagaagatgtgtcttaccaaggtgtctcgaacatcaggatcgttgaactccgcaggtatcttcaacccgtttgcctctgccgctcggattgaatccataattcctgaagcggacgggttgctgtcctacagcattgcaagaaagatgttgatcgccgaacgctcagacatattagttattaaaacatcaaaaaaaagtcctcagaacgcaaaaaatacaatgaaagaaaacctaccactctgatttcttttcctccgacatgcttgccaatcttcttatccaaaggcttcagagtgtcattgtaagcgagcgctgccgctctagagaactgcttgtctagatctcggagtcgtgcgcatgaaaacgtattcggatagagcgattcctcggtagggttccggatatgaacgtccggtcgccaggatcctcgagtgctggacgggtaaagcccagtagtgatctgctgaagggtttcgatcgtcctagacatggaggtgctcctgtttgattatattcgacaaacatcaaccaagtatatagaacccctggttagccatttacatgaataagataaagtcatgagattgattattaaaccataagtctaacctcaagaacaagtcggctgcgttaggagaagaaggcaggaagcccagtctgttcgtttgtcgacagaccaagaaccataagttaatgttgccatttgatctgcacgagggactacaagcaggagaggttcgacgtactcatcgacatataactttctgagcgattgaccaagagctaacgacgtctttctaccaatatctgtcagctctcctaacagactgtatcaccaacagacagatgtgatgaaggacatatacacatgccggacagattggtcaaatctctacgcaaagtagacaaagagggacgaagatatccaaacaaatcggagaagacaatgggagcaaggacataccagtccccatcttttgccacctccttcgtgggtcccctaggcacgtcaacctttcggttgaccctcaagatcccagacgacccggtctcttccaagacagcagcatcgaactctctaccgacgtgacacatgttccaccggatgggaaacaagtttgtcattctgactcggacaggagttcgttctcctgtagaaggttttttttttttggaaatcagacgttgcaagtaacaagcatgatcatggcggtgacgatataaaaaggcaaggaaggaaggaacaagattcaaagtgcaagaccaggataatcagcgttcatattagagcatgcatagccagaaacataataagcaaagaggacgaagaagaacagcaaaaggagcaaaccatgtctggaaaagatgtgaacttgttcaagtttcaagttggaaccaggaaagaatgccgattggactgtagggtgaatagcctcaaaagcggtcggtggtaccgagggagatgatgtgctcgacatgctatacggatgtgtatatgtgtttacgagaagtgattcaagaagttggagttcgtcctccgtaggaacgatggagatggatggacgatgaagggtgaaaggtgaggctgatcggatggaattgttaacatcgacgtagttcccggccaaggacgatcgaggaccaacaagatcattgataatcctcttttgctctcattcgccattcatgacattgctcaatcttactcgaatagatcatccattgaacatatggaatgattaaggaagatatgtgtttatagttctatgtacaattacaatctttgcggcctccttctacttctcttgctgatagaaaccatcagtctttctacaccgttcggacccttgccctcacctctcgcagtcgcttagattgcggacagtcgtgtttcgaaggaaagacctttcttaagcacctgccggtcggacaacggatcccaccctcgggtcggtaaagatctttttgcagctcgtacacacaaggaagaccgtcatcctcgtctgtagaatggtcaacaaaatggttggtttcagacctcttgatcttctctcttcttctagatatctcttatttttcccaaaaactggtttggatcttacctcgtgacgcttggactgatcttgatagaagacagctctatcgaaccaaaacagtggcacgacaacaattgaaactccgttagtcttgccttcatattgatgcgctcagtgtacgactagaatgggcgttacgaactctggatggtgacagtgaggacaaggaacttctgaccgtctcggctatgacaagagagcgatagcgttggttcatgatcaacacgataaaccacagaggttgcctctaccatccggtagaagggtgacaaatagatgagcataccagtgtcggatctgtctcaatgtcttgaatgactcccggttgctctctaaacacgatatagagtacaaaggcaacagtcagtaagaactctctagctgcaactgacttgattgtggatgctgcgacagaaaaggctcgaaacacgacgggcatagcaaacttccctctatatgaatcatcctctcaacccacaccctgtctgtcctccagcacctcctctcttccggtttgcacggaatcctctcctcttatagatagtaaacaagatgatagaacaagacccattgacagactcactttgtgatcgttaatagatcatttctataaacaagcgccgcgtcggcttcttcctcatactggcaattgcgacaggctctcagtaagatccttcggtgcacatcggcctagaagaagtgaagagagggtagaacaggcagatatttctcagtataagatggatagaacattcggacgcgtctagaacgagaaaagaatcaaaagaaaccggacacacgaacttttgggtaaagtagattattgctatccaaatcccaagtcccaacccagcccggtatcagatcaagacccagagttcaagatgttttggttcatcagaaaattaagcttgattagttttcctttcttaagataaaatgaaagcgaccattcaagaaccccctcgggtgatagtcgtccatcctgatcagatgagggtatcacatgaactaaacctcttctcaatcatcctggctttccttcatttgtcggaactgctcgtggtttccaggtagacggaagaagaggcttggcttgaaaaagatgcacaaagaggtaaagaccaaccattctctgcaatacttgtagactgattttggaggtgccatctagaaacacttttgtagggtatagaataggctgtcggcaagagaacgtggaaggggaaagtcggggtatctgacaggactgattcaaacagatgcgtgtccttcttttggttccttctggtcttgcttcgtttcaacttggattgctttgcaaggtcgagcaaagacgaaacagagacaaaggaaggtgatggtttgacttgctttggtcatcaagcctagttcgacaaatggacgagcgaggcgtcgagtgtgtggcggctgtgtcaaatgctgtgcacaacctctggatcaaggcagacgacccagttgatcaacattcatccattcagtatcaaatgaggatcgcatacaggacgggactcggagagcgtaacaaccaaataggtttactcatgtgggcaatgaatagaagaacaagaaaacagtagaacgtcacgcagacccgtcttatttcgaggttaaatctccttcttttcctctccagatccattctcatcctccagccagtgtgtatctgctaactctccggcagcacctttgatgatcctcgctcctgcatccctcaagaaggtcacaacttcctttcctagcctctctccattaccaccctgctttccgccaacgatatcgaacgacgagcccaacgaaccggtcgagtcagatgacgaggctgaagctgaagccgagggcgagagggcctgctcattgacaggatcagtgatgaatgaggtggctagataagcggaggcaggtactttgtcatctccagactcaagactaagtagataactctccaggctcttagaggccttgagtcgggcacggagaacctgtcgaacgagtcgcctggaagggatccgagttgggtttggctcatacggaggaggcagtggggacgtcggtcgaggagatgtgggagatgaaatagtggcatcagttgaggaagaagagctcgcctgagacggcggagtaaggatgatatcccaagaaggcgggcaccaaatcccaagcaagatccggaatgtggccaccagcttccgagcgctattcaatcagatggatacaaacacagtgaaagaagattctgagatgagaacctaacttgagaaagaaaaggtacaaaagaacagggactgactggtcatagttatcgtcaatcaatgtcagatgataattgatgagtccaaagaccaacgcccccgcgacgcccaggccgactattcctccaacccaggtcccactgaacgcaactttgtagagcgcgattgcacaggccgggtagatcattgcgctgactagcagtccaaacaccagcttcatctgcgccttggtctcctcctcatcctcaactagcttcgcgccgtacctgccgaccagatacaccggcacgttgaccaagaatgggagcgcaaagaacggtagtcggatcagagacgacacgagatcctttaggaacagtgccagggtagagaatcgagtaggaagaggagttggccgagaaggatcgagcgtggatgggagaggaatctgtgacagcgagctgtgggatagacgagcagtctgcaggtaaaagtggtaggacaagagggcttctttgaggagagataagttgctcgaaggaggagggttggcgagcagatcgatcaacctgttgaaaacaaagctcaatgtatatcagtttcatgaagcttctgagaacctcctgagacttcgaaagactacagaaactgacgtttgggtaacttctctgaagttttccatccttagatccttctcgttggcccacaacaactgtctggccaagatggctgcgttcaacgtatccctgagtgaaaagaaaaatatgattgtgaacagagtcaatgtttcttccaaaaatatttagtgacttttcggaccacctggacaaaagagacaaaccaatcaggagcgttgactgtgagctcgatcattgcatcctctaccgatttcgttagccgtttgacggcactcttggcttcaacctcctcggtcgagaggaactgttcagaatattcatccacggtgattggtgtgccgaatctgttacatggttcagatcagatttttcgttgacgattgaaggcctgtatggagctcacggccttttttcaagagaagtgaaaagaagtggagaattctgtaagggacgtactcgatcgcgactcgacttcggtattttgtcttgtcactgtacgtaattcctaccgggatgactatcgcaggtcggacagagttcttctccccgtcggaagttgagctggcgcgctggtcctctaggtatttgacatactcgagtgccgtccagccaacgccatccttgacgggcataagtcttgaatgagtgtgcgaagttccctcgggaaacacgccgatgacctcatctctgaccagagctgaaagtttgaacagtaggagggtttagtatctctgatcactttggtcttggagaggagtagatcaggaggagtaagcgatggaacggttggaaccacgaaccttcgaatgttcctttgaaaaggacttggttgttcttggtctttcggtcgactgggatgtttcctgcgttgagtaacaacgctccgagagccgggttcttgaagagtgagtccttgacctacattcacatacattcgtcgatcatgatttgacacccagtgtacgaacaagcacacagtcatgagcgatggttgaggactcttaaactgtagagcagtacaagtgcaggaggactaacccagtagtgaatgtatcgtttcttgaccgacttggtagcttcgataacggcatatgagagacaggccggatcctattatttgccccatgatcagaaggacgaatgagcgaaggggacgagaagaccgtgagcatgatacattataggactaggacatgagattcaaaagagaacgaacaatggctagaagagattatgaggattgttaaggtaagtggaataataagaggatcagccttgagagaataagagacgagattgaagtcctagctggaaagacatcctcacccatgtttagatgagagcaagcgctaagacagttaccaagtatttgcacgagttcatccggcagtccaacaatgtgtcagttctgagcgggcatcaggctcgcatatcctctccaatcaggctgatcggaagaatttgagaacgagagtgtgaagaaagctggagacgactaacaagacgacacctccttgggcaggcacattctccgtgccaagtactttgacttcagaaaagaacgagtcgacggcaaagttggatatgttgaccaggattgtgtgggagattccgaatccggatggttccttggttgatgctggtgttactgtggacatttctctctgtatctaagtctttctgggtttctctatcagatggaggagaggtgtagaacgagatagagaagagagatgagaaatggagtggccggaccggtggtagaatcgagcggtatgttagggttatcttataactgccgaccagttcacgaatctacatgggtatatgctacatgggtatatgcgctctttctatttgagggcagccaaggctatatccttgcttattgaagcattctaaccgacgagttggtagttggtaacaccctgtatgtagcattaggaagagttgaaaagggagagagagggagccaggtgaggttattgttgagagaatgaataagcaaaaagactgataaaaagcagatagatacgaacgccttcgttgatcttgacgacaactttttttccaaccagagcgattaaacaacggttcaccttgatctgcggcaaatcagatttgacaagatctgccactatttgttgtttttcagagggaatgtcaaaaacacactcgcaggggctaatgtataaaaagcagaaggaaacaaaacaaggagacctactcttcaggccagtcggactgttcattaacgatgagatcacgcgctccatcgcttgagtcagagcctgggtagtaccgagtcgttagacaactttctgcgtgaagcgtgaggtaggcagaaagaagataaaaagaatcaaggactagaacataccggttgagaacctctgaactcgagaggtagagtatccatcattgagctaatctttgcctgggtgcacacatatgcatgtcaactataagctctgaggcagtggaagacagaagaatagtaagaaagagagactcacttccctgagcttcctcgctgccgctcctccggtcgaggttcctcctctacctctacctctagctcctctgcctctagctccggcagaggttgtacctctggctccactctgacctcctctcgtatttcctccagctgccgctcgggccttgacgttgtcgagtgcttcctcctcgtttgcgaacgagtactgagagtgctgggtcatgtatgtcatgtctgccggatgagctgggttcttagcgactggtgaaccaaaccgggatggagaagccgggttaggagatgagggagcgggagcagtcgagtgagccatcggtctgttagcatgcatctcgtacgaaagatcagagggagcctgagttaacgagtgggcagagtgagagtaagcatgaagagccggcgttcgaaaatgaggataaagcaaagaataggctgacctgaggaaactcgacgctgaacgcgttcatcctaagaccaaagaggaagccagcaaagccttcgttgaactctgcgagacttctactgagagccaccatggaacaattgttctggtgaagggtatctagctcgtctgttagctctgcaaacgagctagcgaggtgatcgagcccaagggtagccgtctcgagtgagggatgggagagcggaagcgaggtttgatttgatgtggagtatctggacatatggccatgattggagcctgatgatgacagataggactgtctgagcgatccttgggagatccgacgaaggggagtatggtgagtagtaggcatggcttcagtcagatgtgtgttgtatgagatgacggattggatgtaagtggcagttgtgtttgtcgcgacgcgtcggaatgaatgatttttgacgcgtcgagcactagagaaaagcattctaaaagcattggaaaagcattaggaaagacattatgagagcatcagaaaaaagactaggaaaagatcagacaaagactaggaaagacactagagaaactatcaaaaaagattaggagaaagaatttcaatcttttccttctcccatatcatccatccattcatccatcaaccagcaaggatccccaagtccatcgatcagcacccatcgctgtccttcttgcttatacttcctgtctccatatgaggttcgcgccaccttcgagctcatctggcaggtacggccttactcttgctctggcttcgtccatagactatccagcgtcctctgacgaagatgatgtcgacgaaagtgatctctcgtcggacgaactcctagactcctcttcctctgcttctttctcctcgtcttcagtctcttcagacgaacaacatacgagcaagcctcagggctacaagagaaagactaaggatactactactacgacgaatagagcggataccatccctaaatccgccttgggaacccctgcacatgccgacgaacttgaactctataacgctcggtcaaagacagccgcatggaggacatcccatcaacatgcccaggctagatccgacgcgcttaatcttatgctcagcaagccagacagaatgaagaaggcaaggaaagaagcagatgatgacctagatgctatcagaggcttgcttgaaggtctcaagatggaacgtgcggaagaggaaaggagagaacgtgaagagtttgataaccgaaatcagaaactatgggaggttcgtctatccttcatcctcgtttccttttctttgccttttcgttgaggtctatatccaaacacatatctaaataagaaactagtttctcctacatctctcagtctatagagcataccatcagagaaaccgaggagcttcatctgaaagctctgcaggcaaagaatcaagaggcagagcggctcgcttccgcactccgtgcgtccgaggaggctaagcgaagagcagaagttgaacgaaaccaggccgagcaagcccgccaacaggctgaagttgagaggaagaatgcggaggaaacgcaaggaaggaagctgaaagaaaaggaggaaaagaaaaaagcaggcgaaatctggggctcaaaagcaaaagcgaatgagtgggacagctgggtgggcaagatgcaggtcggtcgccatcttcctctatcccatcgcctatttttcatttgtgcctgacctgctttgcctctcactatagaacatcaaacaaaacatcttacccaaggtgaacgcatcaccagaatggcgcaagaagtgcaacgcagtcaaacgtcagatcaccccgaaagttggacagatcaccaactcccaatctcacattctctccatcgttcgttatctctccctttatcttttcgcgccatcagactcaagcttttgcatcctttgctaacattcaacctcttttctcatattgatctagacctctgagatctcactcattctacactctgcccgttcagcctcaccagaaatatacacctggatcctcaaccatttttccaagattctcatcaaacaagcagaaacagaaatcactgctaaaccctctgccgcctttcctctcgctaggcttgttgttgcactcatgctgatgggacacgccgatggactgggagaggtgttagcgagtagacttgttaagaagtcttgctgggtcgttccgttctggccagcaaggaaacaggtcaatcatctctcttcttatctgtttcttttttcttctcgattgttatgtatgctgaacagggtctgtactatattgttaaaatgtatacagggtcaatctgaggcagattacgataaatccaccggccgactttcttctccagaaacaacgcttcaatacacgctccgtcaaaccggtattcttaccctgtatttcaccatcctccacaccctaccttcaccatcacttctccctccacttcctccgtctcatccaccgtatcctccgttcgacccttcaaccattccctcgttcttcattcttccttcagggtggctctgggttgctagcttgttgaaacccgcactttgggcatgggagggtacgccaacgtttttgggtgctttcatggatgtctgcgcttcgaggatggaatctatgtatggaagacagatgagtaaacttttgagaaccgtgaagagagaagttgatcgggaacgagcggcgatagcgtcgggtagtagtggaggtggagtaggagacaaagatggaggctcaaaaaggttggggttagagagactggctcttcggctagatgagtgggaaaggataggggcttggcaagatgtagacggtggattcaagttggatccataagggtttcacttccttgcttcctcctcccttttctacctcccttgtcctccttctttctcttgggattgccgtgtatgatttttgaccgaccagccataaccaatgtactatcatcaacacctacatatacatgcattcatccatctcggcttcatcagagaagagtcatcctgctttcaacctacaattatctgtcgcgaggcaggataaccttcgtcaaccatcatgcctattactgaatatatctcttgaatgagatatacgtggtgcgtatttaataagaaaattagaataggggattaggattatgtatatgtgtaacacattctaaaaattgaaacaaagccttaaaaaggggacagaatagaaaagaaaaaggtctataaggactgaaacaacctgggatataataggatgagagtgaaaagtattcctataggctgaggtcacgttgaggttgtatagaactagattaagaaagaaagaaagaaagagaaagagttgtaaaatatcaagtcgagttgttttggttatttctcctaggccctccaaagttctcggacctgcaagaagagaagagaggaaccccaattgcagagtatgagtaggcattctattcaaattcttagacttagcctatgattctcagagactcggtagaaacgacttacatatttgttgggtatgaatatatgcagactatcatatccatatcagagacacagaaaagcgcacagacgatcagtaaggcaagaagaaagaaggaatagaaaaagatcgaccgacctcgccctatcttctgcggttggcttctttgcttcccatatagaattaatgtagtcgtttccagtccggtcggctatctgaacatcctccagcttccaattatcaagatccacacctaatgatcaaaacatgacgttgttcaaaaggaaacaaatggaggcagaattataccatcgcaagacgtcaattcatcgcgtactaggcagacaagaatagaacatgaataaagttctctcttacttcggatcttgcttatgtgggatcctagcgatctgtgcactcctgaacctgtttttgcagacacgaattaaaacgaaacgatcagccgtgatgctttattgagcatacggtcaagcggagtgagactcacattcaatgcacataaacccgatcatcttgctgtcatagagtgcaatagtggcccaacgaggatctttgcaagagaagaaaagatcagaatttagagaaaggaacttgcagctctggcagagatctgatgatgaaacttactggctctacgacagtctaaacaggtactattttccttcctcttggagatacccaaaatggaaagcgcaacatttgcttctctttcactttccgactcagctccctctccaatccagtcgatcggacgctgacttccctcactgtgtgttcttctttgagaggctgggccttgcctcgtgacagatagccctaggtcaggagaagatgctccatttagcccttggaccgaatggttataatctccgccgccaagaccgcctcctgcactgctgtgacaggagagacgtctaacggagaaatccaaggagtgtctggaggatgaggaggagaggggcggagaggacaatgagccgtccggttgaagctgagaagataccgacggcgtagtcacgtggaagctcggtctactcaagaagtttgctcgcgagaatctggacgagattccatccatagaaactgtgggaagagattgatccatgcttcgcctctggaagggactactaggacgtctgatcgatcctgagggttgactgcccccgaagagaccagacgttccttccgaggggctgtgtccgtggctagacttccggctccttgtcagagaaatctttcgagcaatcgggtttccccagttacggatcccaggaaagggcgaggaactctcagggaagggggctgaggctcgacctgaactagattgagttttggagttcttgaggagaccaagatcgtctaccgatgttgaggacgggctagccgttccgaacccgccacgtacagaggccgtgccatttatagaggcttcgatagcatttcttaatcaacgataaatacataccaagcccatcgtcaggtttagaaaggaacaacatcttcagcgcgtaaacacatcaaagcaattactaacccaagagcagcaacccattggtgcatctcaatctcactggtcgcctgatatcttctcgtcgatttacttgtcacaagctcaaactatatgtttttcgatgtcagatatcaaacacatgtcaggttctcaccctcttcaagatgcttgcaaagaacagagacaaaacttacaacaaacctacggtctgactttctgggttcgcgcgccttatgagagcgaaatcagcagaagggttcaaacgatctgataagtctctagcattcagatgcgtgcatacatcgccagggcacttaccgaagcaaacatcagatccgtcgaacaaggagcgaagattccgtcggtattgattcggtgctacaggagaataccacaaaataagcattagatttctgttagatacagacgttgtcttcaaaacgaatagattgattgatctgcgggaatgtacacacctccagtaagtacgattgactgacttcgcaccagcacactatttgcggtcaaagaatacattggcttgtcagtgtcatcaccaacatatgcgtgtgaactggaagaaaaggaacagtcaacacccactctcccaattgccacccttcacagcatccccactacccttcctatcgcccgcacaccacagccagccttgcttctttcgtccttgtctctccttcagatcgatccaagctggatccgttcttcctgtactcaatccattcggtttgccagttgaagcgtagttgaaggacgagtaggattttggaagaacctgaatcgaatgacgagctgatctgggtttgatctcgttggcgagaacgggggattgtggtggtgatattgccttatgcgctaagggcgcaggtttaggcgagggacctccgaatccttgagcttgctcgggattactagataaggaggacctgttgatgactttgaaacgaggcgggggtggagggataacatccctggactgataactgcttccaaggctagaaccaaacgtcgagcccagaggggcagtcatagaaggtagactactgaacactcctcgaatcttgctacctagtctatctcgtttcctctctccgttcgctaagggtgcgtcaggaattgatcctatatgaagttctccatccgctgatccgtctcgatcatcgtcaagtatagcggaaccagcgccattggaaagttcaagagcaagctgtcgttcggttgacatccgtcgattaggccagttctgaacagcccagtgtcggtcattggcgattgagagtccatcggctacatattgacagctcacaggactaacggggacgttgtcctgattgaacagttgggaagggaacgtcagaagtcgagtaaacaaagtggtaaactgaggtccaaacgtcaagtctaagagttgtgtctgtatttggaattgagttagtctgtgaagattcgccagatgaaaagagaaataaaaacataacaaggatcagtctggtatctttttctttcaagtctactagatgaaatgtattatacaacaacgtactctgattctcgacatcttctctcgtacgcaatatctaacctgggactatcccggctgacaggagtcgcgagatatctggccgtataagtctgaaacgctctggtctcctcctgttcagtagtacagatcaacgttcagcgctgacctcgaggaagaaagaagactagaacagcacgataaaacaagaacaagaggaagagactcacatcaaatccgctagctttcttgcctagcttatccttttctgcctctttaacggcgtccgaccaggcccctaaaggctctatcaccgacttctctagaaagactttctcctctcttcgctgtctcctcctttttccaactacgccctcgtctttccaaacttttgctagagcgccctccggtatctcctccatcacatctcccagtgcttctattcctaccgccaaccgctcttccgcttctgacagtgcagcaagtaagccagcgacgtcggccgccagtgttttgactaacttgacatgaggcttcaggagacttaaacgtttcgtcaggctatgcatatgtgatctgaatcgaggggtgtctggcgtgggctctaccgggagtaaaggagacaatcctacttgagttggaacaggaggaagaggaccagataccactctatccgagtttgtccttttggctgtcgttggcgtctctgttgtcttcgtcattggttttgtaggcgtcttgttcatcaagtcaagtgaagaagaaaaagtcgtaggtgaatgatccatattcggcatgagcgagccaagattcggcgtgctcgacgtcgaacccatgctcgtccgactcgagtcaatggaccctcgagaactcgtagtctccacagaaattgagctcgttcgcaagaaattcaaatctcctccgcggatcggaatttggtgttggtattggttctgattcgagtctaacaaatgtgttccctgtggggtggaagcccgggccgaagagggtggtgacatgactggaaccgttaggctcgaggatctcttcacagaaggacggcgggcaacgatagctgggttgtcgtctttggggctcactgaccgggcatcactggacagagatgctagattcgaattcaaagacaaagaacgaaacagaggagaagaaaagatcagattctgaaggaacaggaactttaattcaaaaaacagcctgaacagatcccaaccaagagaagctatctaacgggtcaaggaagcatcttgaacagaccagtcatgtacatactttttctggacgtagttgaagtagcatctactcttgcgaatcctctctctggaagtgagttgtccagctcggcggtcgaggtgtgtgtgtcgccttgtggatagataccaacattggtggcagtggcagtggtagcagaagagaaaggagccccgacgcctgggtatggaggaagaggaagaggacggggaccgttcatttaccgtgacgcagagctggatccaggaaggataagaaagaaccctgagcgaccagaacaagagaagaagacgaagaagatgaagaagatgcgagtggtcgtctcgaggtgatgagcaacggtctggtcgtgggattcgaaaaggttacaacaacacccaaacaatgagaacttttcactttcctcatttctatctttttagctttctttcgtttcgaatcagagtactcgacttcaagaaggataggcagcatacatagcttggctcttgagcagattgatatccaaagtttgccaagtaggaaaaaaataacatatcatcatctgcaacccaattacaagatagaacaggttttcttgttctttattctctctttgatcgacaagagcggagaaagtgggaagttgttttaactctatcgatatagatataaatggtaattgaacatgacacgaaacaaggtattgtgacaagagagggggggggttgttgcgtgaggttggagagagagaggagaagaaggagatcggaggaacaagctagcaaactcggaaaagaaacctctaaggagaacgaggagacatgacgacctagagtcggagagcgagctcgtacacactatacgacatcaaacacacgcaccaagcgcgagattagcttaggatgtctctgacacttcgaagaaaaagtattagaaacgcacctgtacatcgcagcggcattgggcacaacccgcatcatgtgcgctgtcaatccactgtatagacttctcactccttcttcggcaagaataagcttgaacgtctggaccaaatttcggtattttggaacagtggcacctgcagggattggttgccttagtcgagttcgcagaacctatgggaaacgagagaacaatatgtgtcagggagcgagtgcaatttgagttgattctctttccttgtattgagaaaaattgatgaattgtaagcgtacctcgtgagggtaggtgatcagagcagccaacatcttggctcctccagcagcaccgagcacacctgtccattctccaagtttgccacccttctcagagatacccattctcttaaacctctatagaatgatatattgaaatgaacaagaaatttgcacgatcagccccctaggttccttcctcatttcgtgatgttatcctcagtagttgaacttcgggagaatactcacctcgtagacgacccactggatgataagctcgctaacgcccaacatactggcactcaaacccttgtaaagacctttgacaccctccgtccggacgatgtaggtagtgcagttccaagcgttggtgaacggaggtttcgacagcgaaccgctcgccgaggacgacgcggccgaagccaatcctaaaggagttgtgatggatgaagcagaggtcgaagtggctgctggtatgggagagacagtagagaggatttgggaagaataagcggatgcatgtgccgctctagctgcagaagtagcggcaccgaggtgagacaatgaagcagtaggcttgacagctgatgcggcaacggctgcagcttgttttgcttgatttcttgatgaagctgagagttgcagtcgagtcttgacgacccagatcggattcgttgccatacctgtggcgattccggcgttggcggcggcgatcaagtgaacccacggggcttcttttccatcgttgaacttttcggcaaggatgagttttaagtttccatacgtgaagaactggatcgatctggaggaaagagtgatggtgatgatggagacaaatgtttgtggagaagaaacgagatcagcttgaccggacagcatttcgcgtaagtccaaacccaagagctagcgatcgtaccgagctggcaccgcgcctaccaaagtaggcccgattcctttccatagagcgggtactccttcagatctggcgatatctctatgattggtattatccaagtgaatttacgctcgtcaagcttcagcctatacttcttaaaaacgatgctgatctgaaacaggcagatgtatgaccacgtagacgaacctgagtaactgtccggtctcgacaaagttccaaagcaagctcgtcgtcggtttcggtggcttaagagctgatcctttggtcgtgttcaatacgccttggacgttttcaggcaatggcacggacttgagagagatcggtgaaggtttcagtgtggacgatgacgcggcggcagacgggagcggttgagcagagtaaggtatcgatttgaggtcggacgtgggatggctgttgaagagagacgattgtaatctggtctattggtcggagaaaaagacgagaagaacgcaggggatgtgtgagctctggtggtgagaaggaaagaagaagctatcctggttcggcacgcaccttgacgacatccaaaggcgcggtgatggttgcacccgtcatcccaccaatactatgtgagcgtttagttgcgggcagcggtagcaagaaacgacgttttcagttgtttcaaaaaccccaaaggaaacattttgatgattcagtatttgagcaacctctgatacgtcaactcgaagcacccgttccagaagagacacgcttcgtgggctggattggatgtcaagagagggagaggaccaagaatatatacgcacgctccggcggccatatgcctccaactcttcttagggtcccattggactgtcggagtaggttccgacttaacgtttgccggatggacgatggctgctgaaccagacatgatgtttttttttataagagcactgtgagttgttcggtagggagcgacgaggacggtagtggtggtgttggtggtgaaaagtcgggtgttctctctaaagattcctgtgttgatttctaccgtttgattccttgccttatcactctgaatgctaatcttcttccgggaacaggaaacaaaccagactgcctgatggagaaggatcgagctgctgccgttgctgttgatgctgctggagtcaagttcagatcgaaatatgaagaaaattaaaatatttgtcggctatgctcttggatggttacagaaggtgtgaccatgctcttgactcccacatgccttctctccatccctcttgctgtcctttgagtctctggtgggtgtatgagtatctgttgcgcttaattatattactgggaagtagagatatagatgggtatgagtcttgcgcttgaattggatgttttctaggagaacgtccgtagagttgatcgtgtaaccaccaaaggcaaggaaagaacacagacgacatcaacccaaaggaagacgttcgactaccacgcaaaaacacatacactctcactcgatggatatccctacaccttctctggatcatctctccaaggacgattatgagatcatctatgatccagcaggcaagtctttactcgtgagcacatgcagagaagggatgtatcacacggtcgaccggttctcaagtaccctcctttcgtatccatcacctagaggactcgttcatccttctcgacgcgttagaacaggatgctttggaactacaggctggaccttcaggaaggtgttgtctcgagattgggtgagtaacgttctcttgtctgcttgtcatgaattaattcggcgctgaattggttgcattggttgggatgatgtagatccgggtcgggcattgtgtctagctttatgggaactatcctgggtcctagttctacccgtgggtctgcttccttgttcaactctttgttcactcacctgaatatgtcaagctcagcttgccctcttcctttccataatttttttgatcattctcccaaagtatacatatctacggacatcaatccccacgccgctaaatgtacctttgaaactggcaagcacaacggagtacgccttcttttgcgcttcttcatacctgcctgtttcgtgatgtgtatatgtgtgtgtgtgtttgtgtgcgcgcgctgatagaattactttacactctagatcccaatagatccaatcttagcaacactttacacctcacttctccctaggatgtatagaaagatagacatcctgctgttcaacccaccatacgtcccaacatccttagacgagtaagtattagcatttctctcttccctttacctttctagacggctgcaagtcgaactgtactgaccgatatttgccgttctctgtgaatgatagattggatgacacgcagacgcagcctggcatcggatccacttgggccggaggacttgacgggatgggactcacacagaccttgctgactcgtttagaggtatacctacctctcgttctctctctccctctgtcattcaatcgtcttgtttcgacccgtctgaaacgttgaatggtgtatcaggatctcttgtctcccatcggagtattctacctggtagcgatcaaacagaacaagccactcgagatcattcagaacatcgaaacgaccactgaaggccggataagcggcaaggtatgtgtctgtctttcttcgcttccactttgtgaggaaaagaacttggctccctttggtctctttccaagtctttcggcgcgattcgatattgactctgattgccggggcttgtctatttcttctctcgaacgaattaggtcgcgctcaacagaaaagcgggtggagagaatctttttgtgctcaagttctggaaaacttctaaagatacgatatctccttgatggttttaaccgtgggtacatctggaagagcaagcctttgtcaaatcaattgtacgctcgtcactgagtatattttcagaagagaggaaaatcaaagcacaagctagaattgaatcgacgggggaaaaatcatttcaagataaagatgatgaaggagccgctgaatcagtcttcctaggtggcagcccgatcctctcatccaattctccactctttatcctttcatccaacccagcaccctcgagaccgaagaacgtccgccaccatggcttcttctcgtttcgctgagctcgatcgatagcgtctccaattcggtagtagtatgccggtttgtacgatggaacgagtgtctttcgggagaacgggtactgtttcagaagacacgtcacatatgggcacagaacggtatgttcagtatcaccagtgaaatcgatcacgtacaagagacatggacaagaaaaagcaagacaaaccttcttcctccagtgattactctccagcttgtccaaaccctgagtcaacccttccagaactctcacatcgtcatctttccagccaccggagatttctccactctcgaccgatcttgatcgctcttccacaagctttgtgagaaccgaaccaaattggacattgggacggagcggatccttgggaatccgagaggtttgagacagaattcgagatcgaagtgtctgagcgagttgagcgggaggcatgttgggctgaagctagttttggtcttgaatatgtgtcgctctctgtctgttcttgtggaaacgaataaagatcctgcctcttgtctttgaatggaaggtagtggtggttgatggcaacacagtatcgattaaatgcgactcgccgattggcgaaatcgttgacctcgccggttagggttacactttgcctgttctctgttctctttctacaagcacacaagcgttgcgccttctatcagactctttcatttaatcctctggatcacttccttcgtcgtcgtcgccgccttcctcagcgcctaaaccaccggcagcagagccctttctctttcttcttctcttctttttcttcctcccgctctctccatccggtcctgccccaagctcactatcgccacctcctatgacgttgacggccaccggctcatcagagcctttgtcatcttcgccttcggctctctcctcgtctcctccactcggtcgtttcctcttttcacccgtgttcgcgttcgtcccgttcactttagatttccccttggagcccgctgccgagggaggaggaggcgcggcctttttcttcttcacactcaacgggtttggctgtttcggtccttttcgcttctttggcgggggaggctgggt

SEQ ID NO: 3131 - DNA, 6301 bp, Xanthophyllomyces dendrorhous
ggctgggtggctgtgacgctctttgagctggcttcatcggtcgaagaagaggggaggccaatgatatcgaccagagaggttggggggagaggaaggaccgatgtaggcatcgatgctttcagcgcggattcttccatctagtttcaaggtcgtccaaaggagaagagagaggagtgggaacgtgaagaaacaattggattcgtcaatcggtcggttagatcacacaagcataccgtgtggcgcaacagaagaaactgataaaaaaaaagagaatgagaaagacaaacctcgttcttctttcccttggtggtctcactcataggttccatcaccacaacactcctcttatcatgcatgatcggtacggcgggtacgttctttcggatgtagttcctgagttcttccgactgagtggctagcacatatcgatgtttgtttgtctcgcctgtgtgtaagacaaaaggtagcacagaaagatcaggtggctgttaagcgcggatgaccacagtcataggacatattaagaggaggaacgaaccgatgacagacgtcaagcattcatctccagggattggctctcggtggttgcatttccttcgctcgaacgtcttggccaggtctactacgtattggctatcgcgtccgaggtcgtatagctcctgcatacagcattgagtgatcactaaaggagtttacaccaaatcgacagcacaagaacagcaacaggatagtatagaacaacaagaattgagaaccgtgctcaaacacaaacgacacaacctgaacaccgaagagtctacacgtactaggtttacatttaccctgaaggacggtttcgaattgcttctcgacgtcgatacctgactttgcgatgtttttgcaaaactgtgcgtcgactgagtggaagggagatatcatagaattatgagcactcgagatcagccagccccaaaaagaacaaaaagatcacgaaacggaccaagagtttgataaggttgcctgaacccaaacgtcaagcagtactatgaacagaatgaacacggacgagcccaatggtcaagacgctatcagcaggcaaccaccaaacccaacctaacgaaacacgactcaacgagactcaccgactgcatcagtctcttgtaggcctttgctcttttctgtctcattgtgaatgcctagatagaagtgagtcgaagagagagagagagaggtgtacgttaggaaagagtatgggagaacgggaatcttgaaaatcgtctgttagggcgggcggaggtgtaaccaagtgggatcacgtgacttcaacacgtgctcccggggttaacttgaaatatctctcttttctccttctcttctctttcgtctgcgttcatcgttcttcgttctccgttctcacagtcgttccactctgcttcgtggacataggacggtcgagtgaatgtacaaaaaaggactcactgcctcactacttcgtcgattcccagtcaaagacgcgaagaatctcccgaccgcaaaggcagccaaagaacttcgaaaaacactaactcacgatccacttaaccctcataggccctctctcgcttcatctcagttctcatacaatccaaacggttttagtccctttcctaccagtgttccccctcccttatcccacgtcgctcctaggatcaatccgactgcattcatgacaccctttgcctcgaagaaccagatgatcaagtcaatcgttaccccaaaggtcatcgagccatctttcaagaagaaactgattgcagcagatggcccgttggtatggatagactgtgagatgacaggactagacttggagaatgacaggatcatcgaggttcgttcctgcgtgtctgcttgagaaattatctatacagatcatgctgacgctgatcgggctcatccacctggttggaaaccgtagatagcagtgatcatcaccgacggagagctccgagcggtagacgaaggcatttcgttcattgtccaaaccccaaaagaggtccttgataagatgggagagtggtgtactgaacaacatggcaaggtatgtgtgtcatcccatgtactctacattcagaagaatagtctttactgaatggtgcctctgactaccctcactttgtgttgatttgctctctagaccgggttgactcaggcatgcatcgactctcctcatacacacgaatacgtcgaagccgaagtgctcaagtatatcaaagagcgaattcctgagaagagaactggagtgttggcaggcagctcagtccatgctgatgcagcattcttaagacgaccgaacggcggaatgagcagcataatagattggttgcactacgttcgtatccatatcaaatttctgtgatctcgaaaggtctattcaattgactcctaaattctcgctgtctttctcaccgtggtcaatgttcctatagcgtatagtagatgtgtctacaatcaaagaatgcgtctcgaggtggtatcgtatgtcgtctgaccatccctgttcgactttgacttgatcgcttaagagctgacctttaatcaattgtaccactttgactcttgtctaaatccaaccccaaactcacagcgaccctggttcctatcttccgccgagcgcgggatgccgaccgggagatcgcgcaccgagcgctggatgatatccaacagtctatccttgagctagctcaatacaaagcaactgtatttgtccctccggtcatgatcgacagctccctacaagccaattcggtctcatcgacatcgtccaagccgaagcacccgagatcggatgagaaaatccaggtggacgataacttgaaatggaatacctcgacgagtccgaaacgatgggagacggaagatgagtatttgagcacgaaacagacgagtgaccagactgagtcgacgaatatcaagggtacgagtctgacgaaaggaagacaggccatacctgtagagccttctcaagagctggctgaataatgtagaggaaagaatgtccacgatgtactagtatctgatccatgtatcatcatcacgttgctcggtcgaaatttatctgcatggtcgtctagtcgcgtctcacgactcctcaaaaccttctttcatcgtgtacaatatgttctgccagtaaaatctcttctttctatggaaacaaatggaacgatgagagaagcgagcgtgctcgaagaacgaaaaagcatttaacgcgcttccgccggtggcgtcattggacggctctcgccgatgtataaagatcccatcccgtttgcactatcttcgattcttacttcaatcttgatcttgccatcaaagaacacacagaaggacagctgttaacatcatgtctttgccaacagctacccttccacctttatccaaagttgcagtcatcggagccggaagtctcgggcttgcccaggtcaaacagttgatcgacagaggagttcagaagaaagacatcgtcgtctatgaagctagagacgacgtcggagggatctggtaagaccatatactctccttagccgttcgagcggtggtgaactgatcaacatggaagaactcatcgaacgtcaggcgcttcgaagaggatgcagaggatccctcagtctactacacacaggccggacaacctctttatctcacatcggcagggctgaataatcctcattctattccgccttccccaatgtataagtctttgcgaacgaaccttccaaactatgtgtaggccatcttatttgatatctttgttcgttacatgcgtgtttagagactcacttctaattgaaacatcgttctgcagcatggcatttagagataacccgtttgataaaggaacagacatctttccagctcatcatcggattcaagactatcttcgtcgattcggagaagttcatgggttagctcaaaagtgctcaggttagatcgaaattaatatatccggttgctgactgataatcgttctttcccgaccgataaacatcccatcaggttgaagagttgtatccgattctcaacttcagttcaccgactattccatacgccgagccctgcttcagacgcagagcgatggactatccagagcgagacagatggtcaaccctttgaagagaagttttctcacgtcggtaagtctatcatctggtttccgatattttgttcgaacgcaccaattgattgatcagatacatacctgtggggttggtattgttttgttctatagtaattgccaatggacattacaaccagccattcattccctacataccaggtctttggaatttcaagggcaagatcgcacacaggtccgtttccacaatgttacagtcttcagtttgtttgaatttactgtgcttatcaagctatgtgcttaattctcacacggaacgcacccagccaatcttggcgctcggcagccgagtatcaggggaagaaactactgatcgtaggggcgaaaagttctgtaggtcacctcttgatatcattcccacaaccgctcgcgcgctactgacagttattaactgtgtgatcttcctcacctgaatcagggatccgatatcgcacacgatctatctcttgccaacttagcgcttcctgacagttccaacaagagcaagatttatctttctacccgaactatccctgcagaagtctttcccgaacctcttgagcaatggacgaaacaagttcagattgttccttcactacgatcagtctcttcctcgggggtcatcaccttttcggatggaatgacgcttgggccagaagaattagatgtcgttctctttgctacgggctataactttgcgtactcgtttatcgatcagacgaaggatgaaccgtggaagagtcattcggtggtcagtccccgactggctgttagtcgagagggcgacgcggagaggcctccgccagagaaggttcagccagggttggaaggccgagtcggaggttcggctgtccatcatctggatgggagctgtgagatgttctatctacctgatccgactatcgccttcatcggtttaggtgaatacatcgttttgttttcggttgttttcgttgtctcgaggaagagtgattgaacaactccctcgctttcgtcgttctttctcatatagcatactgggtcgtccccttccgattatcagaggtccaatcgcgcgtcatcgcttatgcctggacacaagcccgccagatacccgctgaacttccacctattcagaaatcggaagaattggaaggtaacccccatgcgatcggtatgccagctgagtggttgaacactaacggctggttgaaagctatcggagaaggcggccaggtcggttgagatttcttccttctctttctcttgttttgtgagagtgaagggccattcgaaaagcgagtcctgactgagatggttgtccgtgtgtttggtcttatttcaaaacaggacggacctggttggcacgaagctactgaagaatggatacaacagagaacgacggcaaaggcgtttagaaaagagttgtatggatactagattgatctctttatcttacttcaaccttttcttctctaaattatcatttgttcccttgttctcttcttttgctttgcatagatctgttcatagacatgttcctctacaactatagtgtgattggcaaactgagccaaaagtatttaacattctatagattaccttccataagtgaatacgctcgagctcgaggctgatgttgtgtatttcatcccgatttcttcttttcaaggcccacctagtggtgggaaagcagatttggcagagagaacgacgatttgatgaccatgagagatatatcctttgacgtaaccctataagaatgaagaaacgtataggtgatatatgtcagaagagcagggtcagttggtcaaatctcccggtttggcctctccgctttcggccaaagcaaggggaaagatagtagaagatgagagaaggatgtaacgaaccttgtaaatcatgttggcaattagacattcgacttctgcaggatccgcgtactcttcctcgtcttcaagatctccaaatgagccatcttctactctcgaaggtattggtgtcggtgttgatgctgataatgatgaagagccggaagcgagttgaagacctatttggaatgtcttgattggtattctcgagagtttgttctgagccaaccaactatcatcatatgtccaaagagaaaagaaaagaaagattccgaaccaatcccaatcagtcgattgatcatctttctgagtcaaaaggctc

SEQ ID NO: 3132 - DNA, 7498 bp, Xanthophyllomyces dendrorhous
ttctgagtcaaaaggctctgttaagaaagacgagggcacgtacattttcttcagccgacctctgacgacgacctctcttcccttttccatagccgtccagatcccaccgccaccaccgccaccgccgccgctcagactcaacagcttcccccgaagagcccgaagcgcgatgtcgtaagctctgatatcggatcgtctgagggcttgaataaagggaagatatgtatcggaaagtactggaaattgagaaagaaggattggggatggaaggagaccgcgaagaagtcggagagggagaagataaaataggatttgtcttcagtccaggcagagaagagagcgaaacaaaacaaacagaacaaaagtcatcagtacaccaatactatttcggtaagagaataacaaagacgatctcaagagaggaacagacttactccagatttcgtttcgcaagccaactacagcctttgaaagcctcccagaaaagatcttccgcagtcttgtactcctcttccaagaaagctaacatgcccatgtagtacctccatgtgacttggtgggctatagggaatgagtcgagtggttgggggtttgaggacgaaccaatggcgcggatgatattcttacacaacgtcggtcggttaacctatatccaaaggggaaaaaatgtcagatcctcatatcgaggttaagaggaaaaacatgaaaaaagaatgagactgactttaaagtaacattttattgaaagaccagcgatataataaattcccctctgacgagcttctacacctttgttcattctatcggtagcgacgattgtgaaagctttattgatgtgtctggcggtatcttctaacgaaaccggtgttttttgaagacctgatgagattgaatattcatccgcctgttcgatggagtttgtgcacgaagattaagggtgtgaatatataacggaacgaaaggacgttgacaacgaagagtaagaacaagctcagacggaccttctcccctagatctcgaagatctctacacagttgataaagcaccggaagaggccatgatgtttgattgattaagaactggttcataaacaacctatatagattttgagaaagacacgttagaaccaacgcgtttgtctggatccctctgtatcagacaagtcgggaagcattccctcatcgaaggacgcgaaagagaaggagaaagaccgccatgaaagagaacacgcacgaaagacactgaacctgctccttataagcaccgacccaactggctccttctgtctctcctaggctcgagctagcttgcttagagaggacgagcacttgaatatgactgatgacgatctcagagaacgggctgggcaacttgagcgtgtgcggtacgagcaagtttcgctagatgcacaaatacgaacgagggaagatgatcaatgtcccagaacaactcccgtagaaccaatactacacctgtccttagcaaatgaaactcattgctagaagagagaaccaaaacaaaggaaagggcagagaacgaacatgagacccagctagaccaagaatgatcctctctccaatttcctgctgatcgttagccaagaggaccgctaatgtctctccatcacgctctctgagagctttttgaacgatctgacaatacttgggaaacggaagcgggatggcctgggtttgcatggattgcatcgtgagcgtatgacgaagaaccagacgaagcaagatgggaagtttgggtgaatgggttcgttcttccttctatcctcacccgggttgagcacagccttgagatcatgtgtacaccatgagagtatcttctttgcccacatcaacatcatcagaatttcatgagacgagatgatcaaggtataaatatatatgtatgtgtatgtgtatatatgagagcattgcaaaaccagcagtatgcagagaaatttgtgcgcagaaccatccaaagaattggaaacaaggaagaagaaggatgtatacagtgaactgcacgcgacgtctaaaatcacaatcggtcaaagtcggtcaaagacgaatgagagccatagccaggtcggccggtcggttattttatcaaaaggtagactcgtctgcttatctgtccaaaagagggaaattagaagaggagatccttcctcaagagtcctatgagaagccaagcggtccgtcttgcgagctcgactttatcgacctcaggcgctgtcctgctctctcctgttcccgtgtccgtcgccgtcgatattgatgcaggactgtcaaacgagaccccaatatccacccaattctcgtctgtcgataaagaatacttcaaatcaggtaacggaggaaggagagagacaagaaacgcttggagttcgacgaatgtaggtgaagggatagcatttgggtagagaagtggaagaagggatgtggacgaaggcatatgatgttcgacctgtataaatgaatagcgatacacgactgatgtcaggatctttaattcttctcggaactgatctcgcttgaaagagagaaggcgaaagataaaagtcgacagacctctataaggacacctttggaagttccaccagctccgctgatccctccgactttgacgacccattcgacctctctctcccccgtccagcttgtcccgttggaagacgtcactccatagggaatctcgaacgtctgtccatccactttaagtgctgtactttggttacgcgttcgagatagagaggatgttcccatatcgacctgagaaggagaaacgagcacaaagtccatcaaccgtaccagtgagattgtgatgtcgcttttacatttgagcgaagagagacagcctggagaagaaaggaaagaaaagaaaagaaaaggaaaaagaaaaaaagaaacaaacgtacaccttccgtccgttgtttcccaattccagctccagctcctggatcatttacaacaaacccactcttcacagctgccaacaactgatggagacttcctggcggcgtaagactcagcatcgtttgttttttcttgctactcggcggcagatctgcctttgtcgccgaacccgtagcagggttggaagcatgagtagatgaagagttagggacggattcttcgatcaacgcatggatgtagggagacgaatgagcgacaacggtatgtaatgaccgggttgacaatcccggcgagtgagacggccctgctgtatctgtgggcgtagggaaagaagcccgatgggagttcaaactgagaagaaatttcgtcgttggctgagcctgtatgggttgaacacaagtgatcaggtcttttcacaagatagtagaagggatggtgatgaaaatagaacgaactagatactgcttcgacagaacatcagcgatcaactcgactgctccagcagccttgtttcgagacgattaaacccgcgagaaagaaaagaaaacagaacaacggtgagcgtaggatagcaagagaacgagataagtgttctagttggattatcacataccggtgggttctgccatctgagccagcatgtactgtgggacatccgagagtgaggaggaaggataagagaaagatggatagtcaagaagtgagaaatcgattagaaggcaattgaagagtaataggagaaatgattagagagtattagaatgaacgcacgacagagtcactgcagtattcactcatctcttcgattgctggcttttgcgagagaaacaacatatatctgaatggattaagcttttttccttctagaacaagaaagagagtttagaggcgttatgggtgatataatgaaacatccggtaaaagagaacagtataggggaataaattcagaggcaggaggcatcgcggaagagatgggaatccaaagtaggagaaatgagatgagactagaaatactacaagatcaatgcgatctatacgaactatatggaagaaggaaaacaaaaagtcgtgaagacatctttcgcgggaataatgggatcaagtgaccatcaaggagaaacaacaaaaatggttggcagaggggggaaatgaaagcagaggatgggaacaagagcaaggagatctgaacttagatagcgccctgcattcgtctactttgtaagagcggctcgataatctccattgcgtcatctacatcccttacgtcttgaagaatcccattgccagtcagtctggcccactggtgagaatctagcttgacggttcggtccatgtcaagcgctttgatgattcgccgtctaaagattcaacaaagagagacacaaagacgtcagagaagagaatataatgatgaggaaagaggcggaagacacgtactggacggtagacggtttccatgcgtattgtacatcgttcgcagagcctcctctcggttgcgaagcgctgccgaaggaaagaaaagaaaggcgacgtgaagcaatccaaagggacgatcaatcgccagctcatcaagataatgagacacaccgctccctctatatatcgtggctcagaactcaccggaggacctcgctatcccgaccaatctgtgccaatgttgcacctttcaggaacaagttcagcgctaccacatccgctattgtcggcgagtaaccaggccggtatatttttggtttcttgggttctttttgaagaaaggaaagaaatgaaatgaaaaggctaatcagtaaggatgacaggagaacagagagaaaactacaagacacaaaattcaccaggagcaacttccaccatgtcttctagctcgatctttaattgtccagatcgaacttccgagggttttctctttgcttggccggcgttcttgtgatttgttcgcttctctacattcattgggacgcttgctaaagatgatttcccgttcgagcttggaagcgttctccactcctgaagaggtgccatctcgagagtagaatggctaggtctggtgtctgtcgatggtgtgaacgatttggatttaaatctggactcgggtcgaggttgaggtttagatacaggctcaggcgttgcaggggtcatcggccatgtggacgtcgatacattcgattgtacttcctccggcttgacgaaagttgcagatgtctcctccgggtcgacgtcaccatgaaggatctccctaacgaactcatcttcctccatagcttcttcctcttctgcctctctgattgcctggctgatctcttcttcttccgagtcttcttcctccaccaactcatcggtatcgttcgagattgacgcagactgagccctaccaactccatatgggacgtccacgttgacacctacggctggcggtgtactagtacccagaacgggaggcagccgatcgagaatcctttcggtctcgtagtcgaatattcttaccttctcaaggtctcgagtgtggagatgccatgttttggaaagcaccccggagagcgcttgttgacgaagaacatggtaggcttgaagccctgaaagtgcatcactggcagcatctggaaagagggaaggccaagaaggacgagggcaggaaataacgaagagagagggtgagccgggggcaagaagggtaaggatcaaattagaagcagcgaagagcgaacgtacaagagatctgttcgggtgatagtctcctgttattccattttgatttaacaacgctcggtggcttcgacagggatcgacctaatagcttgccaatgaattttgctagacttcgaggctgagagtgaggagtgcgcgaatttgatcgtcagtcatcataagaccttcgttcattgtctgatgatgaaagaaaaacgaggaggagaacgcttacacctgaatggttggattccttgagcgatatttgatttaggtcgactactccttgaacagaagtgcccagatccttgtcaatcttacaagcgtcctctggaggaacgattaccattgataagcatgacccaatctttcaagcggttagcatgtatgtatatctgcttttaaaagtcaacttggaaaagagactcacgtcgaataccgacgcctactttgacaaaactttcgtcttccagcagcttgcacagttcctccggcggccggctcatcttgaccaaatggacctaaaaaagagatatcagagtgagcttccgatatagacgaccgagttaagaacataaagattaatatagacatacgagcaagataagcttattgtctgctagctgaaccagggctgtcggggagggcgagacgcctttccgatagcttggcgtccattcgatatccagcccgataggcctgtttcacggaagggaagagtcggatgagaacccattaagcgaacaagatttcatttcacatccatcaaaagcacacagatataggacgtacgaagtgagccgtccgatggcagcattggcttcttcgattgtgttgacgaagaggacttctggtggatcatgaccgtctggcaagaagtccatgtggttgtaagctggcaggtcggcgaatgcgttcaccttcttctttttgggctttctctcttttgccgcggccttcatcttttgaagttctgctttttcaaacagacggaaatgactcttgccatctttatcgaagaacgactctctatttaacaagagatgatgaatgtttggtggttgatgagtgacaacaagggtgaaaataagagagtgggaatgaggaacaatgacaatgaaggctgacaggggatgagtgataaagctcaaagacaaaggagagacgagtaggaatcataagatgaaatgaacgagagaccgacccaatctttttaaaaggaggaggcatcctaggagacttagcagtgaatccccaaactcttctgatgacgttggtgttcggaatgttggatgagaaagatctgtgaacgatcacggacgggcggctcgacgaagaaggcctaaagatcagtctccctggtactggaccatgagaaacagatcgtgccgagtacacgacatgggcaaacattgctttctgaacaaaagcacaaaaaaggtggcaagacgagccaacgagctgggtgagaatccgacgttagagatgatccacccagacgaacggatagatgggatgggatgggatgggatggagacaatgtagactcgattaggaaggaaagaggaaattcagagacatcacgcagaggcacgtcagcggttacattcaatgggttagtaaccaggattaccgtaatcacgtcgttgggccaaggtgctctgccggcgcccagcacagaccaagtgttctccaccaagatccccaaacagagcgtatccatctaggttgtcgaggcagagtgtgcctcaagagatgttgagcagagcacctttccatcagaaatgaccgttcgagtacactcccgtcaagactacttactgtgcagagtacgactgatcagaaaacgcccgatgtaacaattagaatcacgtgattcattgggcttacctaatcgtaacc

SEQ ID NO: 3133 - DNA, 626 bp, Xanthophyllomyces dendrorhous
ccttcaagccccccttgttccccccttcccgctctgtttccttcccggctgctcgtttccactcccacttcttttttttccttttccgtcctgttttgtctatctaatcagtttgatcatctccaacaccatctatttattcgttcttcatcccatcacccatctttcttccgtcttcctcactctgatgcctcggtcaaggcattcgacatcaacacctctacagacggtcgtgtcaaagtctccttcgccagcgtctagtccgggaaattatccaccggcacttgcaccggctcctccttcgcctcttgttaccaggcttcgtcaagatgctatgtgggctgccgtcagtcagttttgtgcgatgtggcttcccactctcggtggaatcgattgggatccagaagtacgtcctatcacgttctcttttcttcttatcctctatctctccttttttttcttttctctcgttcccgtttcctcttccccgtcgcgtccttcgtgtttctcaaactgacgatcttctcctttaccctcttcttgttcttctcctctttctcctcatcgtcactcacttttcatctcgtaccttctctttagaggatcgagtctgattttgacaacac

SEQ ID NO: 3134 - DNA, 1143 bp, Xanthophyllomyces dendrorhous
tgatgactcagcttctcacttctcttaccttggataaacgtatagagtgagtggacgtcgtctgtttcgcttcctccttccgatcatccctcctaccctcttccgatgtttgttcggatgtcacccgccttcagattttctttcaaaccggactgaaacatctcggactaacacggatgcttcttctctttccacatcaaacttttgacgtgactagtaagaccaactgggttcgccatctccgcttacagtacctctcccgttcaccagaaacgaacgcgttaggtacagaggaggagccaagagactggcctgaacttgggttaggtgacaaggtttgtttcagacgtgattcgttcatccctccattcggatgcaagttctgacagaagtcgatctatatgaacgcgtctctctctgtttctctgtttcttagcttcgagcaatgcacgatttgtgcgagtggcagctggtcgactgtgaacgattccgaggactcgttctcaacggcgagcccgacgaggaaatcagctgggttcgttctcccatcttttcctccccgttctctgctctctttccccaaaactcttgctcaagcgcgtcatcttttctcactttccgcgctctcaactcatacagaggatccatccggtcggctgggacgccaaaggcaacactttctggctgtttgatgacagcagactctgggtccagcacccgatccctcctaaaccaatcaagatggtcacccggcggatcaaggtacctcgtgagaaggtcgtggcaagaccaagaggacggaggcagagaggcaaagctgctgctcctactcctgctcctgctcttgttgagagtagccctcaaaaatcatcgaggacgaaacgctcggctccgctgtcaccgccggcaccagctcctccgccagtaaagaaggctagatcgaccagggcttcactccgagcatcattaacgcttcctgaatgggaagagattcctaaagagtggcttgatccgctccagccggaagcgggagcaggcccggaaccatcttcctcatcctcatcagcagcagctgtcaagacggaaggatcgaaacaggacgccaccggttcaatagatagacgcgcgctgaaagggaccggt

SEQ ID NO: 3135 - DNA, 20612 bp, Xanthophyllomyces dendrorhous
ggaagaagaaccagatccaagagacgaaattgtcaagatgaaagagaccttggctgggtttacagaatgggaagccgtcagtcctctcgcatccttctttcatttcaagcgctttttttttctcgcgctagaatcttgatgtacaaagactaaactctcctgttttcccacctcccgtataggtctgtgtgtgcaggttcgattgggaaaactttccaaaacaatttgagaattcagaagatacggacgaacaaatgttttacgagtatatcgtagagaccgtcgctcctcaggtgactgccgctttcagagtcagtgcttcctttctcttgcctcccttcgatgacgaagatttttctcatttcgccacctgacgtgtcctgtctcgttctgttatgctctgctctgttctgtttattcccaaacgcgtatgcatatatgcgcgtacaaaaggaaatcgaacaccaaaagaagcttcaagaggcgattagaaataggaaacgttcttcccggatccaacatcttgaggaatccaaagctgaacaagaacgacttgctcttgcccgacagtcgaccgaggcgcggatggaaaaggtccggaaggaggaagccgcccgggctcttgaacttagagagaaacaggccgtcgagaaagccagggaggatcgattgaaggagagggaaggtagactttggcagagggaggaagccgtcaggctcgcaaaggagagaatcgaggaggaaaaggcggaagagatgaggaggagggaggaaaggtacaagattcggatcggagagcttgatcctacccagatcgaaggcggccagaatggttcattctcttcgtccgaccttaatccagccgggttggagactcctcgaaatgggaagggctcgagcgggaaaaagaaaaattcagtgttcgccaaaaaggcaggagtggagatcggcggcaacaaagtcgaggctctgttgttccccgaccctggtcaaaacaagctaggaagacgaaaactatccgcctcgggttcgagtaatgctggtttgggcagaaaaggttctctcaatgggagcgcaaagaagaaggtctcgcccacaaagaagaaggacaaagactggacgcttcgatgcgaggtctgcaacctctacgcggtcaacccgttagagtttggtccgattatctgttgcggaaagtgtggagagtggcagcatgaagattgtttggatcaaagggatgcaaagcaaggtatccccaaacgtaactggaagaaagttgatttcaaggtaagtctctttgcgctctttcaaagacggttcacgcgacgaatctagttctctgacccactctgttgacatgtttcccattctttcttcatcctcgtagtgttcatcttgtcagaagaaacaggccgagaaagccctccgacggaaatctagtcaacagaacattcaaggttcacctctctcgagtcccgctcaacctggaaacactcaaactttaccaccgtcaaccatgacgtcaacatcatcgctaccctccgcgcctgttcctctcctgcctaatggaatttcccaccccgggttcttctcacatagcgtgatgtctccccaacagcaacttcaactccaacagcttcagcttcaagctcagcaagctcaggttcaacaccagcctcaacgccagcaacagcgtcaacatgcggttcaacacatcggtcttcctccctatcagagctcatccaacggatcctatcctgtagctgtaaacaacagagtgccctactcatcctccccacacacccaacctggtgtgccgacatcacatcctcagtcacattctcagccccaccttcaacctcaaggtcaggcccaggttcacattcgatccccaatatatgccacctcccaagttcagccccaacctcaatcgataactcactctcagacatcgcttcagtctcaatcccagcgccctgtttcgaccggcgatgtggatgttggagggcatcagccgtatagaggtgcagagtcgtattctatctcttcacctagtgctcagcaacaacgacccatccaccctcaggtgacatatccgcaaacacaagtttcaaatcaaggtcaaaatctacagacgcaagtccaagcccaagcgcaaggacaggctcaatattctattccctacacccaatatcaacagttcccacctgctcagtctcatctcgcaggatatcaacgatctcctcaacagctccctcatcaggtcttccagcagcaacagtaccagcagcagcatcaacgctatcagaacgttcaacaacctcagcaacagcaacacgtcgctcacaatcctacacctccggcgactgcttaccaccagcaatatccgacacatcagacacataaccctcaatccaattcgttctctcatcctcttccaatgtcccagcagtctcagccacagatgccagcgcagggccaggtacaacctcagctatctcaccaatcacagcagagaccgcaatagtggtagtgatgacaatttcgaatgggcctaggaattcaaaatctgattctctccactcgctctcgctcatcttgtcttcttctctctctctttcttgtctggtccttttctttgtttcttatgatattctttcacccctcctcccttgattccccatttcattctgtcttgtctcagcattcttgttccccctacattcttcctcttctgtttttcactgttggttttccattcaacgcttgtatcagcaaaattcattcgctgttccacatatcccttctctctttactaccttttccttcacccttttcgtttttgcttatttgatccggactgtgatagcctgccattcaaggcatatctctgtcttcgctctttctttttgatttttagtatatatcgtacagatatgaatatggtctaggatggggccgaatctcgaagagtcacatttaacttaggaagctaaagactgaatttggtggcactccatatatagagtcaaccgtctgaagggtttccaacgagcaaacagattaaatagcgaagatatagacaaagaaaggtaattaaagaaaaaaagaacgaatccgagactctcgtgttcaagccgacaaagccttctcgatccccttcaacaagataccgactccgtgcgctccggggtcgggtacgttggccttactgagttcttctctacctacgtaagcagctctgccagctttagcctgaatctttgaagtctcagctgctgcgtcgaccgcttgacgaactgcgctcgagaaatcattaggggcagaggagaactgggtctggaaaacctcgagaggatcgaccagggttctagatggggctcgggctacagtgagatgattagacaaccattgagttagatttctagactgaggaatatcaaggtctcaaagaagagggaaaggaaaggaggacaaagacaaacctcgagtgtattcgtacaacgtgttcttggcgaacgatacagccgccgcccatacttcagccgtagcagcctgagttttctgagcttccgaagcttttcggagacctgaagcgagggcattgaagaagatggagtacaaggctccgctcgttccgtccatatccctctcgatctgtttgtcccgggaagagttagaagatgaaaataagcatcatagtcttggcgttgaagcaaaaagaacgatactcacgttctcagccaacgtcaagacagcagaaatcacatccgtttcgtcgatctctcctgccttgagagcgttcaatactccctcccctcctgacttcaagcaagttccacagtctccgtcacccgcgattgtatcgtatctagtgatctctggttcagcagcgataacgtcctcgcaagcttgcttgatagctgccaagaaaacagaagacgaggtagctgatagatgtaatttgaaaaagaaaagaaaaacttagtcatgatgttctcaatagaagaggtagagcaaccggaaggccacttacgaggcagaggagatccattgttcttgacagccttttcttcactcgaagcttcctttgtgtcgacgtgaacaacaggctcgctagcggcgttccactaaagagagaagtatattcatcagtcttcgaaacaaagaagccaaagcacacgaatggaaaaaagagattctcacagcccaaccaggagcatctcccggagcgtcaacataggagagaagctgatcagctgtgtaagcactctctccttctctaggtaagaggaaaagagagactgagaatccaggcatgtcaagcgaggtctaggaaacgatagtgatcgtagtaagcgcactagagattaaccgcgtgttaaagtactctaagtgttgacataccatgtaggtaccggcaagtactcgtcggaccttgagacctttctctgatgctacctcaatggcatgtccaacgatgccactcaactcgagctggctgattcctcccaggttgttgatcatcaagacaacctcgtcctttccgtcgcctttgaaaggaacgaatgacctatccgggtcagaggtcgaaatggagaaggtgatcatttggttcaagagatccctcgtcttgggtagggtaatcttttcgagacctggctcattatgaatacccataccactaagagatgtacatgtccgtaagtcaaggtgacgaatgtcagggacggtcgaaatagtcagcgttgatatagtcagatacatacagttccatctcatctgccttcagatgtgactctgtgctggttgatccgggtaactacaaagtagtgtataaagaataagaatgggaacaggacaacagaacacgattgaatgcttgttattgacaggtagacatcagagaatagtaagaacttacgctacagtgctcgagcccgactcccaaggttgccgttctatcggccacgtactttccaagatcatagacctcgtcaatctctgccccttcctttgccagcgctccggcaattttgtaaacaagaacagttcccgccatacccctgcgaccgaccattttaccctgctctcgaccgaccgagacatcttctccgacggcaaggagtcggattttggatgatgggttttgggcggtaaactgctctttcgcgagtccaaagtggaggacatcgccagtgtactgcatgatgacgatcaaagttctgcgccggtagcaaggagaaacgatgtgagattgagaagacaaagtggaacgaggttgctgaaggatgtatggatgtggaaagactaaccccttgtcattgtttacaatctcaagagccttcttgacttggttggtgttgggtgctagaaaatgaaagcagcgtctttgagtactaagagcagactctggccggatataaagacaacttacaagcgaatacattgccagatctaaaggataagtaggtcagagttcagttcttaacacgtggcataaaatgacatgttgtacatacactgcagcactcaaaagaccagctccaacgaaccccgcatgggaaggcctgaattaattatcatcggttagtttcttgaaaacagcgacagattgccagctagtcagatatgtttgaattgagaacatgtactgactcatgaccgcttcctccctatttttgttgattttttttccgacagaaggaaaaggcaggctacagatcagcttcagaatctcctttcttgtgtcggataccgaaatcatacgtaccccagagatgatggaaacctggtgaggaactttggccaaatggataactacatttcccaggtatattgagtttagaatgtacgaatctaccttggcagcagcagaagatccaagcagaaaaggagacacttttgaccatacctttgtattcttcgttaagctttacattagggttaagagctacgactcccttcagagcgtcgagtacgatagccttggggtcgttgacgatgtgttttgctatggataggaagaacatgtaccgtaagaaccggacgaaaaggaaagatatcagcacaaacccctcttgctccaagatagatgagaataaagacgcacaagataccatgatagttctactaggtatgagatgagatgagtggagaagatagagagtaggatggaacaggaagaagaaagtagacaaacagaatcgaggcgacagttaaaaaagtgaagttccggatcggatgaccgggatgacgttcggcaaacgacggatctcagatctgtgcaacagatcacgtgatcaacaagctgcttaatcacctatcaaagcatctcttatctcttaacaacatctcactttcgctaggaagggtacatacgcaacattcaggcaatcacacaatgtctacattcgcacagaacacgttcaacgcagcgaagtatctttcgtttcgacctacttatccggcttcgttctacgatatcgtatacagttaccatcgtcatcgaggaggttcattcgggaaagcagtcgatctcggttgcggcccgtaggtttcaactgaattcttttgccttgaaagaatcgtttggagtcaacgcttttgatgaggtgctgactctctttcatcttttggactcttatgcatctggatttatagaggtttcatcgctcagaacttgtcaaccaagttctcgaccgtcatagggattgacccatcccagaaaatgattgattcggctctacaaccggagaaagccgaagatgccaggattgaatatcatgtgggatttgcagagaatctctcaagcttcgtacagaacgagagcgtcgacctgctgattgtcggtcaggtgagttttagagatttgatatctgcagctttaataggtagaatattattgaccaaatcgtatctatcatctcctgatgatgtttgctctcaggcatgtcattgttagtacagtctcacgcatgttcaatcgaagcatacacactgatcgcttcctgaataccaacacagggttcgactttgataaagtttggccagagtttacaagaattctgaaacccaagggaacggtggctttcttcgtaggtatctctttatcgctccatactttgtggacctaaggatgcgagttaatcgaatcttgcgcttctgatacgtcttcataggggtatggaggtttgttcctcgctgaatctctactctccatcttggtccctatcttctaaaaagctgcttcataccatcttaaccacagaatttcaccttccaaaacatccctcgcaaggcccgttgatcagcaactactccaacagtccgtcctcccttggtccatactggcaacaacctggacggtccatcgtcgaaggtctcctcgatgccgttccgttccctacacccatatctccctacgctcctactgaaagctctttgagaggatgggagagggatccggctgcactcgttccgccaaatggtatattagacccggaaccggcttcgccgaaaacattatcatcggttgaagcctccacatgggatccatcttctttcctccggctgaaacaattcccgacattggtcacgaagccgatcgcaggcacacctcaagcggatattgccgaagggcaagtatcaatcaaaaagacattgacttgggatcagttggaagcgtacttccgaacatggtcttccctgcacacattccatcagacccatccagaagataaagctcttgagagagatatcgcatcgaggcttatctacaggttgagacaaggcgtcagacacgatctcggaagagcacaatctggagatgcggtggaggttgaatggccttcgttattgttccttgctggcaagaaatgaagttttcagattatgttctgtcttgcgcttaatcgaatgcgttagttcagctcatcagaaggaaagagaaagaggaaagtggccgttctcgtcatcgatcttcgtagatatgagaaagaaaaaaagggagttacagaagtttttttttgtttctttgtcgcagagagttagagacgaagaagagaacactaaaagaacatatggacgtatccaacgttgaaagagaaagcgcaactagacgcgacaaagcacgacaacaaagcaaacgacggggcaaagccaagcgggatgagacaaaagagaaagccagttttgagcatggaaaaaaggtaatgaaacgaaaacgaaggaaacagtagtattgagatgagaaaaaatgcttgactgtggaatgcgtgctcgtttattgtagcacacagcaaggtagagaaattgagaatgaggagtcaatgcagaagagtgatgatgagaaaagttgtgaagtacagaaatgatttgagacggtaaagagaggagggaaagaatcaaagactagactgcaagaaacatgctccaatttgaaaaggcgagcaatgatgcaaaactcaagggaaaacaaacccataatcaagaggaatgacttgagaaggaccgaatgataagggaaaataaaaccacgcaaagaccttgcaagaaggagaataggattaccgcatgattcttctgtttctctctatcggctggcctggtctaattcagacaatcccaagcccacattctcaaactgcctcagccctagagagttccacccagaagatcccaggcctgacctcaagccctggctactgtactcgacgtgaggaggcgatcgagtatatgcatgcacatcaggtgagatgtgagaaggcgatgtgggattattcgtccatgcttggagcaacaatcgcccgacgtctggttcgacctgatgattttgaaagaaaaaaaacgcattaaagaacggttaggttagaggtctcatggctggtctgaagagtgacttgacgtacttcagttccatctcggctgactttctgtcaatggttagatatcgttcataaccaagatgttgtgatcagctgatgagcaaaggaaaatatcgcgccgaaggaaccgaaaagaaattgccagactcacgatctctcgatcactgttccaagggtttcgaagatgtcgaattcgctggaacggtaatctttttgtttgaatccactcgattttaaagggagttccccaggttcctactcccgtatccttaggactcttctcatccttcgagtcaacggccgttcctgtttcggggttgactgccttgggagaagtagccgacagaatgttaggtgagggtgggagatggagattagggaagtagaatccgccggtgagtcgagaggaggatgtgtcgagggaagaaccagtaaacacgctaggagccgagcctgaggagactccttcagatgaagagggaacaaccgattcaagctgatcttttcgttttattccgttctcatcctcgctgttgtcatcgccatctggattgatgttcggactggtctcatcaagatgaaggtgaggcttgtctctacttaacgaggacgatcttagatgatcaggcgaccttgacggagaggtatcgggtgatactctcgaacagcctgccttagcaacctcctcgatgattgcgttggtctcgacttttgtcaacggtcggaacacctctgatggatcagcgattggcacgtgtgccgggctggacgcctgttcgagctcagcaggcgcgcttgattgatggaacactggttcccggtacgcttcttgagaaagtgttgagcttctaaacggagggatatcgagtcgaccagaagcgtacttcttttcctcccctggcgtcaattctgctggagaagtgctcacatcaggcaaaatctgactcgggagtttcatccctgcggccttcatcgagggagttagctttgagtggcctgggcgatttccagatcgtttgccgcccaaaggcttatggggcgccgtggctgctcgaccgactgtttgagtatcatttgcttcttcctccgcagtctccgcgatacgatcaggagccgatcgctgatgatgagggtggacattaacagagcccggaccagaggatgaggtcgagtgcgcagaaccaatcgatcctcgagaggcccaagagacacgggtggtctccttgttgatcggtccggccattctgtgtacgtcaagatcatttgtggtgtagtcagactcgatgtttatctatgtcagccccagatcttgaaggagtgtgaggaaaacgtaccgagcatagccatagaattcacccgtctgatttgctccaaagatcaagaaaacatctttagatgtccggaaggcttgatcgaggacctgctcgttatgcggctgagttgcccacaagcctttctctgttgacgtatccagatcggtctgtaggtggtgatattcagtcgaattcgtcagcatagtgataaagatgaagaaaacgataggatataacttaccgaggtcagacttttgagaataaagtaacggacaggaaagtaccgtgcaaggactgtaacatcaggatagtagatgttaaagttagtcatgttaatcctcttggtactgaggagaaagcatatatgcaagaatatggctctcacaactcgaatcggtagacgcctgagaagacatcgttcgaagactggctgtactcaatcctttttcgggccggtgaggttcccaatctggcgcttgtccctctttgacttcatctacccgtggcccttctggttgattcttatcttcttcgtgataggatgccacaggtatcgtcgtcgtcatcgtctgaatatctgttcccgcctcctctccttttgcccatttgctctttacccaaccggtatgaactcccctgcctctctgtcctcctacaccggccttgagctggtcttccttgtttctgatacgacatactaaacgaggactccttgccccttctgccggccgaatcggttggttattaaagaacgcaacggcctgaagaagagtgggttcgtcataataattgatgaagcagcagtttgaccgggcaattggaaatattgaggacacgactggatgctgtcgggagggtggggtacttgtatcagtcacggtcaaagaaggagactggggtcggactacatttgaatcgggagagggcgaagatccctccaaagagttaggaagcggcgtagtgaagaacctccagagttcttcttcagttgcatctgaaggctaaagttagagtaatggatgatgccttgattagtgttggttcgacgatggaagtgctggaaaacagcaaaagtacgaaccatgttcccgacccacatcacaaactcgcttctggaacagaattgatacgaaaagatggtttaaaaaaaattgaacaataagagaagaaaaaagtgagactgatggggacttgagtgagattacaacggttgtaacacaccttgtagcggcagagacaggatgccaagcctttcgttccagcgtccgggaaatttctttcaatcttggatgtcgcctggggtggggttgctgagcgggagatgccgaagacccaatcacttgtttccccggtcttacaggtgcagaccctaccacctgttgacctgaagagatcgatggaggcggaggtggctgggaatataccggagagatattgaccgggctgtagcctggtggaccgggataagccgtagggttaggatatccataaggcgattgttgggaaacgtaaggcgatatcgttctcgtcgccgatgaagcctgagttgatgctgtaactgtattgagaggcgaagaatacggagctgagcctggactatgcttgagtgagtgtgcctcgtaataacctccaactgagggcatgaccggaaagtacatccatgtctgaccatcggggccttgaattgtctgaggagaaggagaaggtccatagatcgtgctcgcttgactgctgttcggggacgccggctgagagactccaccataagacgagctggatgggggaccattgaaccctctgggagggatgggcggagggtagtagttatgggagacgttcggatagtaaggcgcataggttgagggcgtagtggaatggacggatgattgggatgccatcgatggagatggagatggcaagcgctgctgctgaagaccgtgcctatgaggaggcatcgggagaggactggcaggaagagaagatgcgtaataaccgccgaatgcttgataaggtgagcctggggggattccgtaggcaaatgaaggagctccaaaggatgacattggaggaggatgatgttgctcgggataagatgtccagttgttcgatcgactagacttcccaccattatttggcccgttataactgtgggatggatagaatatcggaggcccgggccgacctacgaagagaaagcgagagaagcgtaggtgagcataggagctaatgcctacttccaaaagaatggcacgactaaccatttggcagttgcatgttctgtccagtgccaaaagtcggtctctgttgagaacctccagaggatgtcgccggctgaccggcaccgcgtccgttctgagcgggaacaagatgggacaccctttgagaagcaccgctcgatgccgtcattgtcttagaaggaatagaacggaagaggtgatggagtccgtcgaaaattcctagcgtaaaggcttagattcatttacatgtcaagaggccagacgatagtgagcagattgaagctgttatttgcgtccgtcttgatatccctcattcagaacttaccaagcttgttgtcagaggaaacggatgatggaacgggatggacttgatcgctatatttctccctctgcctgcttgaagattctttggccttttcttttttgatcctttctttctctacctggttgttaaagatttcaagagagaatctttctctggatgggtttggcctttttttctgagccagtattcttattcatgacgtcactcatgacgatcagcctgggcagggaaggtatttcgaagaggcggcttatgtagcttatattccacgtgatggtcgggaaattctccgatgacgtcatcatcaactcacgtgcgaccctttttttccttttgcttattcttaagggtctattttcgatcagcatggcatcgctcttacagaaagagttatatgctggctgtaagatcgatggatgagtgccttatgtgtgatacatgtgcgaagactgaatgtgatttgttctgatgctgctatgtgtgttcgacggagtgtctctataaatgctcaaaatcggatgtttacgaggccaatctgatatggagggagagagaagattaggaagaagacgttcaacacatatgtacacacacacacagtctttctctctctccctccctctctgcacacaaatgtatcgagaaggtgaccaaagtgccctggagtgatgctgactaataaccctagcaaacaatgtttagccccaggctggcgtaagtactggccgcgtcatctaagttaatggatagtcgtccttcttcagttgaaggggctgacgacactctctactcaaacgtctacaagttcatccccaaagactcagctcctagtcgtcttttcttttgttcgttctcctcctaggttgtattctacatcgtcttgatttatcaaagccagatcggagaggttgccataaagtctaggtatgtgtgctttctctcgatatgctgtctctgtatatagcatctcatatccaggacttactccatcacctctcgattcttgaaccttcatagctcgcctctttcaatccaatcataatttctcttccacttgaattgctcaaaatccttagaaagaccaacaagcaagagaaaaaagaaatctcattaccctatcatcatcaccacaaatactatgtctcagtcagagtctgacgcaggccgacttcatcggccaaacgatttagagggcatgcatcgtgactttggatcggttagtactggttactatatcatcaaatcctttcggttccttgacgtgcccaaaaccaacactgacatattccatcaccaacataggtccgagccggaacacaatcgtgagtattcgaagtgatgactgtaccttctttgctctgggcaacatctcttgatacctcgacgcttgactgacacctcttcttcctctgccactccgctgcataatttcctcatcgtccactccttttcaaaacagtctggttcaagccatgtctgctgtgccctgggatgatgctgacgactcagactcctccggatcagatgacgagggcgaaacggtctccgtcgaggaaagaaggacaggcagtgctacctatgcacctcaatcagatccagcttttgggtccggccaggctgtccatgaaaagactaacccgagtaagccctctcccacgcggcctgaatatcactgtatctccattcctcatccacttgaggtttgactgatatatgatgcactctaattgtccacatagtgcgcccaactcattcgtcgaggatgtcttcatccattcataccattcaccgaccagttgcctactctcgagcgatctctgaatctcgaacacccatgctggagagaaataaaccgtcattctccggtcacactgatgcttccggcttcaaaaaagatcatacccttccctctttccaccataccgacccttatctttcgcacacagtcaaccctggacaacattccaaccagaatttggacaaggtcctttttagccatagagagaacggcgtcgaaaagtttcaggcagacaatcccactgcggacgaacaagactacgaacaccagacttcagataaatccatcctacacggcacccgagaaggtgagaacgttgagaaggaagaagccgatggagacagagccgaggaagagctcgttaaaggagattccatccaggacgaatcccacgagcaggaagcacgaagcctgatgtcccgaaggcacccagacaagaatgccaataccgatgagcatagttcaatcggacgaaggaaaagaaagcagaagttagccgagaagctcagggacgtattcaacctgcccgacgtggaaccggtccttggtgaactaccctgctggctcctgaggagtatctgttcgtatcactctataccaatcgtcttcggttatgtgggtatatgcaagcgatactgacttaggtctcggtttgatgtgtttggctatctcgtcttagtgttgcagggatacatgtatctcaccactggccatctctgcttttatgctgctctgcctaacaacgcagaggttagtgcacccaatcctgatctctttacctcttctcgcgcaccttctacgtcgtacgcttccaatgtcatttttctcgtcaaccacatacagcacaaggtcatcaaaagcggacctctgatcaagaaatctcgcaagagtttgcgggcaaacaagtactggtttgtattgaagaacggtgtcttgagttggtacactagctctgctgtatgtacctatttttccgaaagccatctcacaacctcatcttttccatttgattcacatgctcgcttgagccctaagatcattgccactgacgagagtatctcacttgcatcttggtcaccgaaaggatccgtatttccctcaaggaaacgtcgacttgcagtacgctgtagaatgtgaacccttcggagagaaggctctgaagttaagcacaaacaggaagaccttacaattctcatcggaaactgttgccggcagagatgaggtatgtttatctgagtttctgtctttcgtaccaactaccccttgggctctcgactttcctatggcatatgcgtcctgacaggcttgttatggtgtcctgtctcttctagtgggtcaaagctctgcagaaggtcatcttcaggacccagcacgaaggtgaaaatgtcaaggtatgttccatcggcaacggttacattgagtttctttcctctggtagaaaggtttatgttcatcatgcttatctgcgtctgtcaatttacgttttcagatcgcgattccgttgcaggcaattgtcgatgtagacaaatcgtctaacatggactttgccgagacgatcgaggtcaaggttgccgagggagacgttacgttggctgtcgattcatactttttcgcttacttctctgatctagaaggatctctccggtaagtacattcctattcatctctatgatgagatttgccctgcccatcattgacaattctctttgttcatcgtaaacaaaagaaaaatccgggaggtagttagctcttaccattcgccagatgctcgggtggacttacggggcacgatagactccaaccgagagcatgtgtttgactccatttctgaggctgcccaaaagaagcgttccatctctcagaactatcctgatccaaccgagaagtctccttcgacgctatcgagtatcaaatccgcgcttctccacccatttgggtcagacaagtcgaaaaacaatgacgctgagcctctgacgtctggtatctcccctcgaccgtcaagtacggggagtgaccttttgctgtccacttctcctctgtcttctgtcatttcttcccggtcaagttctagtgttggagtcggaatcactcgagttggatctaaagatgaacacgttttgagtgaaccttttaccggaacaccagggatgatcgaccgatcggtcaccccaaccccggccgacagccaccgatacccaccaatccccgttcaatctgatttgaaacagactcctacaagctcgtctgtgtcttcgtcttggagcgcttctaatctacttaatcggtcctctaccaaatcctcatctactacagtgtcgtccacaaagacaaagacatcgtctaacccgattgttagcctctttggcgctgtcaaaactagtagattcaaaccattctctacttctgcccgtcaggaggatcttacgaccggacacgaggcgcaaggtctgtacgagacggtttctcctaaagtagagattgagggtgatatgaccggccgggcctcggaggacagctcaaacgaggacacagcagactattcattgatggagaagtcagagactgccgatcagcaggcggaggatgtctcgaaagcattccatgaatatttcgcattggacaagaacgaagttctaattgaacgttcgtatttgtcatctagttcatccctctattcattaggctgactgaaggatacttgtctgatttaaaaatgaaaaaaaaactcgtccgtttacactgattcaaacagaccttcctggattcttgtttagagtcgttccagtttctggacaggtctacatctcgtcttatcacttctgcttccgttcaactcagatgttgtccaaaactcgggtgagattatgcccaacacatcatcttgccttgtgagcaacaaaactgacagtcttgtcttgtggaaactgtagatgattatcccacttcaggatatcatctccattcaacctcagaaagctttcaggttcagtcaccaaggtctagcgatcattatcaaaggtcatgaagagctcttcctcgaattttcatctaccaagaaacgagatctatgcaagcgcctgttggacaaacagattgaagaggttaagaccggccgagtgcctaagcctgctcatgaaggtccttcagccgcgatgaaacgagaggccaaagtgctttcggatctagacgcgaaagacatgaactccccaacagattcaaactcggcttctacctcgctggagacgacagataaccttccgcccgttatgttcacttcggcttcttcgacgttcttaaatttcaagccaaagaagagccttcatatcacttgtctaactatcggatctaggggtgatgttcagccttgtgagtataccttttctgggctacttcttataatttcgataaatggcaagaacgagatggctgacgaatgaagtgtatgactgcctcttcttggtaaagacattgcgctctgcaaaggactcaaagctgagggtcatcgcgtccggatcgcttctcagtgagttgtccatcttgcaacgtattttctacacatcttctcgctacaggtagaggaggctaaacatgaacttcgtttgatagcggtgaatacaaggactggattgaaggcgtgagttaggatatatcgaaaaccatttgtaagaccaaaacacttatcagaatccgttcatcttttgtctttcacagcacggaattgaatttggatatgttggtggagatcctgcggagctgtatgttcttccatcgattctggctgtcgaagaaagagtactaatctgttaattgggtcataggatgaggatttgtgttgagaatggtaagcgctaattctttcgtcatacatatacatttgcaatgaaagttggaacacgatactgactcgaaattatctttgacctttaggcatgttctctgtctcattcatcaaagagggactcgagaacgtgagtacaaccgtatgcgcctgatcttgctcaagattcatcgctcactttacttcttcgtacactcgccatatcagttccgagactggattgacgatctactccagacatcctggaaggcctgccaaaacacagaccttctgatcgaaagtcctagtgccatgggcggaatccatattgctgagggactaggaatcccttattatcgagcattgtgcgtcttctcctctgctcgctacatcgtcatctactggaggaagaaaggctcttatctgatcttattgtttatcgtatttcttgttttagcacaatgccttggactcgaacccgagcgtacccacatgcgtttgccgttcccgatcaccacgtgagcttgatcgttagattctgagcaatttatccagtacggaaggcacttacagtctgttctatttggcacagcgaggagggtcctacaactttatggtcagtctcggttgatctggtagcacttgccatgtttcgctagtttactaacgatgcgtatcctcccctgctattttcgacgaccagacctataccatggtgtgtgtcgtctttagaaccatgctctaaagattctatctgacaactgtcgttccttggttgctgtagtttgatcaagtattctggagggctatctccggtcaggttaataggtggagaaagaagacgatcgggatcagctcgaccacgttggagaagcttgagcctcacaaggctccgttcttgtacaacttcagtccaacggtcgtccccccgcctcttgactggtacgaatggatcagagtaaccggtcagtgatttcttctttgttttcacggagaatttatcgtactgaactcacatatgtctttcccttttctaggctactggttcttggatgatcccgaagattcatcggagaaaaagtggtcgcctccagatggtcttttagagtttattgataaagcacacgaggatggcaagagagtggtctacattggtttcggctctatcggtatgtgtcttcaactcgatcatctggggaacaagcttgagaatccatcgagtgacagacttttgacaactcatattatcccctaatagttgtttctgatcctgacgctatgactaaatgcgtcatcgaagctgtgcttgactctgacgtccgatgtatcctttccaaaggctggtccgaccgactgagcgcaaaggaggatgatactcaaaagagcgagaaacagaaggagaaggaaaagaaggaaaaggaagaaaaggcaaagaaggaggcagcgtcgtacccaccagagatcttctctctctcaagtgtccctcatgattggctattccctaggatcgacgccgcttgccatcacggaggagctggaacgaccggggcgagtttacgagccggtattcctactatcatcaagcccttctttggagaccagtacttctgggctgatcgtgtcgaagtacttggtgttggttcgtccgttcgaaaactcaataaggagcattttaccgccgctctcaaaacggcgactcagagcgagaagcagatcgagaaagctcgtgaattggggaaagaaatccgagctgaaagtggtgtagctaatgcgatccaggcgatctacagagatctcgagtacgcccgttcgctcataaagggtccaaccagacagacccctcccgatgcttcgagttcatccagcccagagtcctcaccatcaaattcaccaagaagtggtccccatgaacttccgtctgtatctttagacgacacgcctgatgactctgacaacgaagtcgtcttccgtcctgcttcctccaccacaagcgctggcaactcggctaagacgtcttccaagatgaccagtgggactggcttcgctcctgcagacgcacatgtcagcggctcttccacgggcgaagaaaacagtgacgattcgtgggacatggttcacaacgatggttcccattcccgttcgaacaccacaagactggcaatgcaaagcgaaggaaacgaaagtggaaggacgactttgaattcccttgggctcggagcagtggtgaacatgttcaacaa

SEQ ID NO: 3136 - DNA, 43747 bp, Xanthophyllomyces dendrorhous
gttcaacaagtagataggatagagactctctctttctttttcagacttgtcaatatttgccccttctcttcttctcttcttcctcttctttctatttgtatcacaatttctaaacactctctgtggttactcctgttccatattctctactgttcttggttgtgctcgaggaccgtcatgagatattcacaggactgccgatactcttgctactcttctcaacttgtctttaatctaatcagactgtagcactaatttttattcttaaatcttgactcgtttctttcctctttcctctgcaatcgtaccgttgtacaaatgtcgctttggatcatatcgtgtcttctacgacctaacaagagacgagcatagaacaacaaagataaagcacgcagaaagataagaagagagatgagaaacagtatggagacataaaagtagtaacgagaagaaccaatgaatggagtgttcaagagtcgaacgattgacaatctagatatataaggaaagagatcgatagacaacaagaagatgttctactgaaaagaggctcaaaatcaggttgattggaaagcgtgaaagatgatttaaatgtggaggcgtatgagaattgtcgtcgaaaacgagctgatcagatgttctcctgaacgccttcgtggatctcctttccaagctgcgagcaatcaaaacaaacacaataaattctttgtattagtacatcattcagtttagtcagattatctggaaagtctacctcttgtcccaaggcagtgatctaagggtaagaaagatcagcaagaaatgatgttagcgtgcgttgttattttctcaaatctcgacgcaagtgatggtcaactcacatcggtctcttgagccttatcttgcactttgtccacggcttcttttccctgtgtatgatgaaaagaaggcgaatggatcagtgcctcgtttatagaccaaacagggaccggccttgctacagtgacccaggtcttacctcctctgcagtagcatgaatgacttcagaggctttgtcaagaacaggctgaagagtggtctgtgacgataaccggaaagacattagatcggtacgtcaacatgaaaactgttttggcatgctgataaaagcgcaagatggactgacttgaacataggagactagctcctttgtcttctttcccaccggcttatccttggccaagagtagggtagagagatctcggtaggccttggtgatattctctcgagcctgagccggaatgttgtttccctctttctgctcgtgcaaagtcaggtatagatggagacccagtcaacgggtggtttcaatgagaaacaaaatgaatgggcacactaacttggaactggcccagctgctcgactaagatctgactcagacggtgaaccttagcctgagcatctccggagatgtcatgaacgaactggacgcctgacgagtaggtagttgtgatctgtaaactgtgtaatgacagagtcagaacgaaaccgttgaaccttccgagattggcatgttttatcttacttgatgttggagatggtatcaatcgccttttggcttttaaagatcgattgtgcttcgaaggtcagtactaaacaataatgcagtcactgaaactgacttacacaaccgcgtgagcttgaactccgattctctgttgacgaagaatcatcaccgccggtcatcagttcagcatgttctcacaaggaaagagatcgcctggcgtacataagcaagactaacgttatcgtaaacattcttgacgacctcgaaagcctgatcggccggcttccgggcgtcagactggagcaaccagatacaaatataaaaaaagttagtcttgttgatgtatttttcaactttaattcagatagtaccaacaatgatctggtcagtcttggtctggaaggcgtacgggaagttcttttcggccaagtcgagtctagaacgcagcaccagtatgtttagaatctagtttaagaccataagagcttataaaagaaaaaccgtttaccctttgttggccaatccgtctgcgccctcgataacaggtcttccatacctagagaaggaccaggactagattagtgggcgagcagcgtctaacgggcttgtccgattaaagtgactaaccccaagataggcgagacagcgttgtaactggatttcactacaccctcagccaggtggtaggccttatcagtgagcggtctggatgttacgacagcgagtagttggtcgatggaatcagactgttacacccgtaattagcaggtaagaaaaggagacgataagcatgacgggttagtagccgtcgatttttgctcaccctctgatgcgcgagatgaggacgacttaccacaagaggaattgcggtctatcaaacgaggcgagaccggtggttgaatggcgtttcaattagaaccaatgaagttcatcaggaaggttcacaagattgtgaccgatgccatcaaagggaacaaggtaggtcgaagcgttggggagtaagacgtcatcagggcacatttgtgagcaaaggacaccgagcaaatgaccaacgcaagacagacaaattcgagttgatctctcttcagcatctctcatgactaccgagcaagaaacgatgggagcgtgaagcaagagttacaaaggacatacgactctgttgacagaagtcaaagtgggcaccccgttggtcttgggagattcggttatggtctcggacatgatatcttttctttcttccacataccaagaaagagaagtttgagatacgtctgaaagcgaacgaagctatcggactggaattaaaatgtgaacgagggagaataaagacgaacggtatgtgttgaagatcgacgtagaaactgtcaagagagatcaaagtagatcgagggagatgtggttggagaagaagagaaaagaaagaaggaacaaaagaaacggaaggtgccggctcattttgctcgtgaaagcggtcagtggagatatatatacatgttcctgtgtgtatgtgtgtgtctgtgtgcctgtgtgcttgtgcctacgagattggacacttgaggggtccatgcgccgccgtacgtgtgtgctctcgctcgcctcttttcttcctgtactccccaatcgctcgtgttttcttccccaaccaagagttctctcttattcaaggatcgagagagcaatgtaccgagcgagcgcccttccatgagatgccgagagaacggggaaggaccgtgcgtggcgtccaaagagaggagttgaaatctgatccgggatgtttttcacgtgaagaatcactcgagcacaaactttatcagttgttgactgaatgcacatatatcttgaaacaatcacagccaacgattggaaaaacaaggaaagagacaaaactcatgctgataggatgatatataataggccagaccggccgacaagatatggctttgatcctgattgaaacaaagaagagtaaaagaaaaagtagatagaagggtatatagggagacggttgggctcgagtctgaaaacacttggtaggtaatcacgacgtaggcttaaatctaagccgttcattcagaaaacaacaaacatgaatatcaggatacgcctgattctggcccctcaattaaacaagcacagaggataggaaacacacctgaacgcattcaatcggctcctggcgctagtcccaattctatcactctcctcaccatctgcacttccactcctactactcccgctcctgctactatcgctactcattggcagccattctctccgcttcgacctcccgtctctgtctctatctctatgctcatcggttccagcctcgatttcacctccgtcgtcctgctcgccagggaagccgaggctcttcctcttgatcggtctcctcgagattctctcgacaagaatgtctttcccgatttctgtctgcagtgctatgtttccgctgactgaccgcctggttatgagcgacgccaaaggtgttccgatcacggtcgtctctgtagtagtcacggatgcggatggaagatcaaaacgtggaggaatgattgctgaacgtggggtcgatttagaaacatttgattttgagcgagcgtttatcgatggtctgtcgacagacggcactggcgtttggtaaacgtttgatgaaccatgccgcgccaaaccgcggcctgttcccacggacgctgacgctaattgagctgcctgagtgggcttaggcgtttcattagatgtatggaatgagaggcgggagattgttggagtccttgcagtgaaaggctaaatcagaaagagaagagatagcctgagttgattattgttctccctgataactcagtccagagtcgaaacgcttaccggactctccgaggcgctccgtctatctccaaatccaactcttttcaagctgaacctctccctccagccaacggcaatcctctccattcgtttctctgttccgtgttcctcctcatctacctctatctctcctccactgatcccacttccaatgtcacttccatcagatataccgctgcagatactctctgatcttgttcctccgtctgtcctatcatctcccaggccatctgcctcagctggatccgcacagtgcgcccatagatcaacaccgcctttctcttggatcgtcgattcatccaccagagactgcgtggtttttgatcgaggcttcgcagacgacggcaaatcggatggaaaccgagggggactactagagatgtatccttcgtccggggaaccaccgtccagagatgatacctgtgctccctcaagagacgatggcgtaggcgacgaaacgccgtgggactcgacattggatggcgtcaagaggtatgagctgacacgggatgggctgcctgctctagaggaagacactcctggagaaagtgaatacaccgatgaacttccctcgtagatgtcctcggcgatttgtctagagatagaggaggacgaaacgttatctcttgtcagatctgacaacggaggctcgctcagctcgactgttgcttccttccttgcctcattcgctggcttcttcctcctcttatcaccgccgctgccaccgttgaagaaaaatttgctttgctcttctataatttccacgggttcaatgaactccgtcatctcgactgcccgcatctttcctttcgcaacagcagacagcccagttgcgcgcgaagatggggtaagctcggataacgttcgctttccactcaacggtgttggaccgaaagcgagcttgtggggttgttgaggaagtgatactgttcgtcggatcatcgatggtgagccgacctttagggaagaagtggctttacctattgtttttagcacaaagtggatcaataagacagagagaaagaaagttcatgtcagttagcaagaagacaagacatgtagttctcatgtttaggcagacatactaaacatctcattgatctttggttgacgctgtatagagatcgtgaaaataaataagcgtcctgttctcaaccggggctttaattgacaactagatgagagacaaataaacagttctcacattgacaaacgtcttgagtccagtcggactgaaatctggccaggggtccacgattcgtttctttgtcactgggttccattcccctctcgagatgcctctcgccagctccaaatcctggatatctggtccgatgaaccggtcttcctcttcgccaaacccttcctcaggaaacgggttcaaagggacgagtgatcggctttcaggatcgaacactcgttgatggaggaacgtgagttccgctagacggaatgatgtcggataatccggagggatcgtctttccttccaagcgcaagtgttgcacaacctagagattttttttccgaaacagttttcccaggagaaataagaacttgagaatttacgcggtgatgaacgtgatccaagaaacgaagctcgtcaggcttaccttttccacagacttgtattttctcagcagtttatgggctgtcttgatgcctattccttggatagaattgatgtagtcacatccagagagaatctgtgaacgtcatttcgtgagcagacctaccgttgagtttctgtcttacgaaaagccaagaagagtgagagaaataagagaatgatatgatacgactgacggccatgtgtctgaattctccatcaccccaaccgtcgaatctccattctccccctgctcctccagatccgtcttcgaaaccaagagtttcccttctgatttcacagcatttcccctctccatccaacttgaacaagatctttctgcatccgaatacgagtagatcagaatcctcggtgatgataccatcaacgtatccgtgaagctcaaggtaggcgagctgcgcatctgcttcataaggggcaacgatatacgaaacgtcttccgcttgaagagcctatgtacgttgacagaggcaaaaggaacggagacggcagcaagcttttaagtaaaggaaggacacagcacaacatcgtttggagaaaagaaaaaaggactaaacatactttgataaactgaaaagccatctcaggggtcacatcaacacatttagtaaacatttcacgggcatctttcaatcggccctgacttcggaaagatttggccttctctaaattatctcgtcgacgtctaatgttattggtagaatatcacgaagaccaaagcttccttctttgttagtgacatcctacaagatagaaacaattcggccaaggggaagatcctgataatcatccctgagtctgcagcttacttttctctctcaacctcggttccggcctttgctggtaggtatcctccgtcaaatacaaggtacggtttgattccatgatacttcaggagtcgaactttatgcatacaataatcgacgaatctagatgaacagtaaagtcgaacaaccaacccaaagaaaaggacggttgatcgttagtgcgtggacgtcaatgatatctgtccagtaattacggagtaaatctggatgaatagacagagaactgactttgtggtctttcggccgagcacaaggtcttcagcgcatccgaacgctcctttgtgcagccagacatatccctgatgtattagtcaataagactcaagatcagaatacttttcagcagtcaaagtcgtgtgtgtgtcgagaaggggacaaacatctacagctagactgatctcgataaggcgccagagaggtcgatgagaatgaaacggtcattacatctagcttggagatcgagatttaaagaaataagggcttacgtttgtccatggtagtctgaaaggtctctccatgtatgagcggttttgagcaactgaacgaatgatgatcgaacaaatgtacgcgatcaatcttcaccggtcagcaccaaggttttctatccaaacaaaccagccgaacttacagggaggagaccttgaatccccatggtattgtgttattgactctatcaaccaaggactgatggacctgaaacaagaccttgtacgttctcaatcgtcctctttccttctttctttctttctttctttaatatcaatctcttggacgcgtcaacgcgtaggcttacatccattacgtgaaccgcgaggaaatccatacaaattcgaaccctgggattttcatctaacaccacgatatcacgacattacgtaacaattgatgaaaatcgaatcgaatatatgaaattcactgaaattcagattcgttctcttcgtgagcgaaatcttctggcaaaccccaccgtttcaaccactctcactcacctttcaaccttttgaactttctttctagagtgagttcttttcattggatatgaagacgaggagatggccatttgatggaaaggagtgaatctttacggtcgggatgactaaccatatacctctaatcttgtaattctcctcactcacctcactgtcaagagctttcgaaaagatgaggttttacgtcgacaagtaccccgaggtggacgacctcgtcatggttcaggttaagcagatcgccgagatgggagcttacgtcaagcttgtaagtgaccgcttctatatctggagttgatcaagtcatgtacattgggcaatcaagactagagctgcataaagaagaaggccgtgttgaaagatcgttacagcatataatggagcgagggaggaggtgcttgaacgatacacaagtgtgcttgaaaaagagggagacatatgctgataaatctttttcttgaatccatctcagctcgaatacgacggtattgagggaatgatcttgctctccgagctttccagaagacgtatccgatctatccagaagcttatccgagttggtcgaaatgaagttgttgtcgttcttagagtggataaggagaagggtatgtatgatattgcatcttttcaaactacatgagtcgctgcgagttgtatgccaggtgtataagagtgcttcagagctgactggttttttctctcactttctgatcttcaacttttttccccatcatcaggatacattgatttgtccaagcgacgagtgtccgctgaggatgtggaaaagtgcgaggagaagttcgagaagggaaaacttgtcaactctgttcttactcacgttgctggaaagctcgagatggaagtcgagacgttgtatgccgagtgcggctggcctttgggttccaagttcgaacacacctacgatgctttcaagctttccatcacgtaagtgtattccccttccttctatccatcagtcatcatttcgttgcggtcaaagtgtcttcacaagttatttgcgactcggtgagattgctaacgcctggacctttctgttgtcgtctctgacagtgagcctgaaaaggttttcgagggaatcaacctccctgctgctaccctcgagactcttcgggagaacatcgctcgacgactcacacctaaaccggtcaagatccgatccgatattgaggttaaatgcttcgcctatgaaggtattgacgccatcaaggccgctcttaaggccggagaggctctctcgacagagtctataccgataaagatcaggctggttgcccctcctctctacgtcgtcaccacaaactcgactgacaagagtggaggagttgaattgatggagaaggcattgcaggtcatcgacgaaaagattacagaggctggcggagagatgagcgtgaagatgaaggtatgtttttatttcttttggtaacacatctaatttctttcaaactcaagattacatgactaaacccctactcttccatttgtgctttgtttcatctttctactaacgatcagcccaaagctgtttccgaggctgaggatcaggagttggctgctcttatggctaaggttgagcgagagaacaccgaggtatctggagatgagggagatagcgaggaggatgagtaaattggggccaattgttgtctgaatgaagcaagaagatttggatgctggggaacaaacggaaaaggcggctcttctctagcttggagagttggcggagcgctctctgtcctgttttagaatactactatgtagctggttttgcctctttttaaaaaatcaatgtgatattctctctgcctctgcccctctgtcttggtctctatactgatactggtaaggtctactgacggacgaacagtcttcagggaagaaggttaagtgaacactgagcgtttgaggcgcaccaagagcgcagcaacgtaggaaggaaaaacaaagcaagctccctccgtgtttgttatgatgaactccatcagacaaacctcatttttcaacctcacctctcgttctctttctttgtcctctttctttgttgccatttcttctttcccggcctagaccgaacagtctctcgacgacctccggtcttggcctctcagcagacacaagtatcggttcagcgtcaaacaaatactaacttcaaacttcgttacccttggatcatcgttcatcctctgcgatcatacctggtttaccaacagatacccttcccttctagcagtccttatatatcgacatcatggacgatcaacagagctcatccgactctgcccgaccgtcttccgctctaccagcataccaagctagactccttgacccgaagtctccctctcgttccggttccagcttatccctccgaaattcatttttctcccaatcgccaacgaaaactgatttgtcttcaacggccagatttggttcacctgttcctctgtctccatcaactgtcaggctgaacactttcacgataggaggaaacacagagagggaaggtatacgaagtatgcaccggtctgggagcaagagcatggatgccactagaggattttgggtagaccaagagaaggctgctgcatctgaggccagagagtttgatcaacaggccgctcagttgaaaggtaacctccacggccttggtctcagcaggaaacctagcttcatacgctctcaacaaaccgggaacagcgagtcaaacgcttctctatcgtcacgacaacaggcgctcgagtctcatccagcggattccttcatcgtatcgaccccaccaagtccttcctctctatcgaataatcatcgatcgagattcgagtcgacttcctcttcctcaagaagcgatagcgctagaccggacagtcctcagtacattcgatccggttcccctgcgttatcgtcctcgactcagcacattccttcaacagcaacctctaacagtcccgctcatacaactcgaaaattacaccgtagggccaattcagcccaaccatttactttccaaccttcgaacccttctgcgtctgctatgtctccctctccgtcttccttcgccatagctagctcaaacaaggttcctgttctgaccagacagcttactggagactctgaaagccggttcttctcgccgactctggcggcttcggctacctctcctttaaccagcagagcgcatagttttgatgcgtctgcctcaaatccgactgaaacttcggatttgactacctccaactccaacatcagttcgacatctatctccaagggcgcaagaaccagaccacattcgttccatcaggacttatccgcaccccttcagtcctcatcctttggcctctcttcgccttccgtcgagtcgccttccatcctgccccctacgaccaattcttattcaaccatgccggtcctgcggtcttcatacgcccgggcgaaaacgtcttcccaaacatctcttcattcgacttttgttacttctcgaccggaatctccttctatcgaacagcctgtcattccagcctcgcctataataccttctatcagggagcctcttggtccgagacgaggacccgcctcaaggttaggacgacatatgcctagaattgctagtggagatgcgtttggatcggacgaccagcaaggcaacgaaactgaagaagccgtccccagaaatagagatacccttaaagttgataccccgaagagatcgcagtgggcggataaggacgtaggaagcatacggagtgtaggcgaaggagacgaagtcatcggtttgtccggctcttctcctttcgtatcctggcagatcgaaagtgtcagccactaatctcagttggcgtttgtttaacaggaatgaaaggtcgtcggagactccctctaacgtcctccttattgaacagcggttcgacttactctttgagaatatcgaccgctacgattgagcgaacccggaaggaggtcatcgccgaggaatatttaacgcgcgttggagaggctcttcagtgggttgaaggtgtcttacaaaaggatcttggattcggaattgttgagttcgaggacaatttgagggatggtgtcgtcttggctcgtatggcagaatgtctgggcgccaaaggctcgatttttgaggtatgtctcttcaaccatgagttgttagtctattacggcacggtgaacgtgatgattctaatgtatgctcacgtcgaactaacttttgattcgattcgatttaaacagcatcctagacttcaatggagacattcagacaacatcatcatgtttcttaattttgcaaaatcgcctatggttgggctccccacgagttttacttttgagacgatcgatttgtacgaaaaaaagaaccttccaaaagtgatcttctgtatccattctctcaggtcagtctactcaactattgcctgtttccccttctgccaatccctcttcttctgagatttacatgttctaaactcttgaatcataaacagtcacattctggccaatcgaggtttagtggaaaagatcggaaatttgaagggaaagctgaacttctcaggcaagtcttacctccaatatctgatcttacctcaatatcatgttgctcaccatgtatattggtctcatgtgttggcctgcagaggctcaacttcagcatgcctcaaaggggttgaatggtcaagccatgccgaactttgccaatataggaaaagatttggcgcgagaaatgaatgtcgagcccccaaaggaaaccgaagaagaaagtaagtcgactcgcacatgttgttcttcaatctactatatttagctctcatttggtcgttgctcgtctattttcagtccaagatcgactcctagatgaagcttcttcatcaatcgaagctcttcaggctcatgccatcggacgactcgctcgactcgactatcatgactttctatcaaccgtccatgcctgctctcgatccacatccactcttcaagctcatctccgaggatctttggctcgtgtgcggtttgcaaaatctttgtctgctcgagggtcccaactagagcctctcgttcccaccattaccctgtttcaagcgtctgcatctggtgctctgtcaagaaaaaggatcgacgcatgccgtaaacagttcgccgcttgcgatagttcagtcaaactacttcaagcccatctggtgggtgtgcaaactcgaaagggctttcacgaatcgaaatcgacagtccgacaacagagtcaaattctcagacaatttgtggctcgagctcagggggcgctcgttcgatcccgacgagcgaccaatgcttcttctttgaatcagatagatatctcatccttcattgctcactccaagggtgttctcgctcgaaatcgattctacgaccagatggatctcctcgacgctatcgatattgctggtttcgtggctcatgcccgtggagcattgatccgaaagacccagatagccaagaagaacgctctcagtagcgtcagtataagccagggcctggtcgggttcagcgcggttgctcgtgcaaagttggctcgaaagcaggttcaagccgttcaggcagatttgactgtagttgttcctttgatctcaaacttccagtcgcacgcgaaggctcttcttgtccgtcgaaaccatcagcagctagcttctgctctcgccaacgtttccactgtttcatcggccaccggtacccaatccattcttcgagcggccctctctagagctaggaaaggagagcagaagaaagaagttgagttcgtcttgccgaactttgtgagcttccaagcgatggccagaagggcataccagaagggagagtatgagtggtggagggaccacatccgtggtgcagatatagttgctgttcggctacagagcttgttgagaggagccattgtccgtcgagatttttatggtcgactatcccacttctatcgaaatacagccgccattgtccgattgcaggccatttggagaggaaaaggtcctcgagaaggcttcattggaatccggctgggaaagaatgtcaaggtctctactgtcaagaatttcgggcatcttttggacgacaacgatagtgaagttcaggatgaggctcgactcaagactttgaagataaatgtatcggaaacctaccgggaaactcagacccttgagatcgaagccgaagaactcgatcagagcatcggtttgtttgctaagaacattgctaatcttcaaagtcgaggacggtcgagtttggagattcggccggttcctacgtttgccgatcaaagcgcctcaaaagaagccgattattacagcgcaatgcttttagatccggaggccgagttgaaagctgaatgggcgagagcgaagagattgattctggctgttctccgaattcagccggacaaggacatcctggcttcgttgatcgcaccagtagaggacgaacatctagacatgtggcatgaaatctctcaacaaaacgcgcatgtcttgcctcctcgccctggtgaggaaccgggttacaacctgaatgatattaagaagtaagtcaactcttccctctttaccttcttgcagtcttaatctttcgtttcccatagtcttcactgattcacaaatcttgtttcatatcgctacatcagtcttccatacgacgaagtcaaattccaggctctaagcgtttgtcagcaactcgaaggagaaggtattatcacccgggccgatggctatcaggcaattcttaattcaatcgcttacgacatccgaacgaagaatcgaagacaaattcagagaacccacgagttgaaatcgatggaagaaatttttcagaagctggatactcgaaagaaagatctggaggaacagattgagatttacaacgcgcacaatgctcagagtatttcaaacctgcagtcaaagaggttagtttagcttgacatgtttgttttctttcttttcgcgctgacatgttctcttgatacggttgtttgccatactcgattcttgacttatgtcagcaaacgaggctctgtcatcccgttaggtaaacagtactggcaccgaagaagcttgcaacagagtgggctcatgcctcgatatggttcatgggtgtatgaggccaaagtactcgtacgtcgctacatctcgatctccttgactacgaacttctttcttcttttcgcgcttacttctctttcattcttacgctctcttcttgatatttttttagtacggccgaggtctcctcctttcagtcgatcagttctcgccaactcagtatgatcggctggaactagttttctcgtctgacacggctggtagtttcaatattgagatcttattttcaccacccggtcatccgaagtcaaccgtcggaaaatcaaccgtgacgatgcaagatgtaagattttgttctttggagttgatgagtcatatcttccaatcggtttcaacctgacaaatgtgtcccatttttcatttccgacatggtgattagttgctgcacaaacaacgagagcagaagaagagcatcgccttgggcctaggtgaatacaatgtgaacctgctggttgctcagttgaataaaagtatgttcttgatatccatctccgttcttgcccttctgtttacgatacgttgtatatacctcattcatcgtgacggtatgtgattaatcgagcatacgctaaccattcatatgatgtttatcaccgccaataacagagttttataagaactgagaaccttgaggcccgcttcttcccatagcttgtttgccctctataccagtcatcttccttgcacgcgtttatttgttccttctcttcgctcatcttgttcctacatgatctctttttccaactctcttagtgctagaataaccccagcgtttgtttcattaacccttctaatgacgttcctcttttttttctcttctctctgtatcttctgtttgtcctcttcgagttatcgtacttactgactgtccgtcttccattgctcttccgtctgttttcctcctttttccttcttacattttccttgatagataaacctaaagacattataccttcttcttcttcatgtctcgtagcctttgccgttcgatccggtctgatgtgatcaaactttattatttgacacccaaaagagaagcagaagcaacttctagagaagcaaccatgagaaggaagagggaacagagacaagcagctcattttatctttgaaagagtctcctcgattgcctttaacatcttcggttcttacgcagtcgcctgtcgagcctgtcgagcctccaaccgagagagctctcgctccttcttgaaaacctttttctctgccttcaacgttgcgaggaagtctttttctttgacgttgaagttctcacccaccaccggtccgcctgcccgcctagcatctcttccagcctcccaagcgtctttactctgatcaagttcctttcgtagggcgacgatctccgatcctttatgctcccagaatgcctcggcctcctcagtccaccgtctgaatcgaatggtgctgttcactctcgatcgctgtcgtcgtctgttaaggttcgagtacttcttgagatcgagtgcgatctgagccctttcgggaagagccggtcgcttatccatcgatggcaggccaaacttcccaggaatcattggtttgacctttccggccgaggtgggcaaaggattggaagcccacttgtgaatggtcttggccaaagtgaccgaacgggtttcgcctaaccttgtggttcggagccggtcccattcttcaggcatattctgaggaagaccgtcctcatctactcctcttgaaggaagcaagtttcccttgatgttgagtgttttcagtttgatgaactgaggaacagtagggaatggtatggcgggaacaggcacattagggtggaatttccagtagtgttcggatttgccgtcggaagcgcgctcgcccttcttaacaaggatgttcttgatcacggtactcttgatcacgcccgctcgctccaagtatgggagaagatcgtttttgaggaagctacaagaacaaaagggatcgttatacagcagaagagagcgaccgaaagggagagatttttccccgtaaagcagagttccaagtttagaaatccatgaacaatcacggagaggatgcaatggagaaaaaaaagagagagagagaagatactgacttcttcgaaggaacaggatggcccgcatacggagcaggattcataatcggcggcaatctgattccatggagcttcctgggcttcttctccctcctgactcgtgccgcaaccagtttcttactgatcgggtagagcttgtggatggtctcatagaggtcctgggctgtcggtctagcctctgctcgaagccgaagagcctcaaataccattcgagatggatgagggtatttcataggagtaagcatggctatgtgctgggtaacaggaggagggacaaccgtttagaataagagctgccaacagatacgatcgatgggctcctcgtcgtcgttgtcgtcgttgtcgtaagtattaagagttggaagagacgacgagaagagagggatatttgaaatatattagacttaaatagctagttaagtgtcagttgagccctcctcgtttttgccttctctctcaaccactcaaacactcatcgtctccttccagctctgcttcgttccatcggtcatcgttctatccaaagccaacatgtctttcgtgagtggccgcctgttttatccagtgtatcagctactcttttgaaaagaaaaccagctgtttcagtgggagagaatcgccgggactagcttgttgcttattgcggctccttttttttctctctttccctcttttcttcgtatccttctaaaccgacgacaatgatcctctgcagacccagcctctccgaatcttggctcgttcgtccgtgtgccgaaagcctgctttgcctcttgcacgatggtaagctttttatactcctcggacgcattccctgacggcttgttttcctctacagccgtgatcggtgatcggttgaatggctgcacctgctcgtttaagccaaaatgctgaagatcgatatttactcatgttattgttgttattgtatcatgaatccatgggtttcgcagcgttcgatccctttcaaccactgctcctcgagcctcgacatccaagattgacagcattgtcgacaacatctcgtcgctaacccttctcgaggccgccgatcttgtttctgccctcaaggttcgtgccagaagtctaccaaggtggtctatgcacgcagggacctaacgacagtactgatcactttgaaccattctgttgatcgcctcgacttgatactaacagacaaagctcaacatcacggagattgctatgcccgccgccgccgccgctgcccctgctgctggaggagccgccgccgccgaggctgagcctgaagttcgtttccacttgtctctgagttttcaaactgttttctgaatgctaagcatttgaaacctcggtaacttttgtaggagaagcccaaggagaagactctgttcaacgtcaagctcgagaagttcgaccctgcagccaaggctaaggttatcagggaggtcaagtcggtgatgcccaacatgaacttggtggaggttcgtcttgtccctagtttatatccgaaagaacatggaagaattgtgaaggagagaaattccgaatggcatattgaattggacacattgccttggtgctaattttaacattttactgacgtgttgctcttttttttgtcattgcatcgacacctcctgtcatatcctggattatctccctaaacatcacctatcggtactttgctctcgtaggctaagaagtttgtcgagtctgtgcctcaggtgctcaaggagaacttgtccaaggaggaggctgaggctttacagaagaagttggtggagttgggctgcactgttgctcttgagtaattgggaaggcttgttgaaattataaaagtagcaagttgttagggaacccagctgagcgcgtagaacgaaggctatgtgcaagagaaagaaaggcatattttatattattctgtttgtctcgaactgatgtgggtcagaatattcttctgaacagcggtcctactcgaagaagacttgcaatcgagcgcgtccgtcaaaagcaatcgtcaatatagcaacaaagagagcgtgttagaaagagaaacgaatggcttggaagaggaaaacgctccgctcgagagctgtatacgagacaaagtcttggactcataccctcctccactcggcctcatctttctctgcaccgttaggtgttcaaacgttcggtccttcttctaaattctcttcatagaccctctgaatgatatagcgcatatgccaagtgatcttcaacgcttgagagctcagacatacatgctagcttcaacccaacacatgaaggcggcctccggcgatgcatacatatgtgatccaagaggctcagcggttactcacccaaaatcgttcaacctagccaagagaaggaaagtcgtctgtccttccggtccaagttccatcttaccttgacccaagatatgttgctcagagcaaccagagcgcttgctcgcctccatcgcgcgcccagaccatcttgtagctcggcaatcctatcgagatcgctttggacaagttcatctaactctacagtcgctggtaacccccttccgaaacacacggaccacgcatggtctcctacaacccttgcggaacattttgaccgtccggtttcgtcttctcagtctacgtcttcatcaactcttgaacctactgggattttcaatcagcacctgctcaaaaatcctgctggtctccatcaagccgctcaacacgttcaccaaagagctgtcttgctcctccaccggattcatcgagcacctgaggcagggcttggtgagctccgtctggttgtcaagaattttgatcggctgagcgacctattatgtgggatcatcgacatgtgcgaggtcatctggacggttcatcccgaaggagaatggagaaatgcggctgaggaggtctatggtgggctttgtaggctgatgaacgaaatgaatgtcgacacgcaactctatggcgtaagtgcttatattcactatcttcagagttcattgtgcgggctgaatgaccgaatggtgttgatcaaaatatccatctctttccgtttacgtttcgtttatacctccttcctttttgtatgcacaggcactcaaacaagctgtggagacgccgtcaatcgccgcttcttttactcctgaagaacggcgcactgcacaagtgtttctacatgatttctataagtctgggatccaccttgagcctgcgtcgcgtgcaaagtttgtcaatctgagtgaccgactcatcaatcttggccggcaattcacgacatcactctctaatccctcatctcctgctatcctgccaaatgcagagatgctccgatctggtctgggtgaatcattcgtcagaagggtgaaacctcggtttggtcgaggaggtggcaaagtcaaaattcaacctggaacatgggaggccggaatgatattaacccgggcggaagacgaggaagcgagaaagttggtttggatggcaggagtgaagagtgaaccagaaagagtagagctgctggaggacctcttgagagtcagggcggagaccgctggtttggttggtaaggcaaactggggagaggtagatgcagagatgaagatggctggaggaccaggtttgttctctttctttccctctacaatgtcttcagatatgatcttgacgaactatgttctctctcactcgtttgttgtcgctcatagaccaagtcacgagtttcttagagaaccttctccgcgcaaatcgagcaagaatgacttccgagcttcgccagcttcaacttcttaaagctaagcatcttgcatcctcaaccacaccgtctctccagccatgggaccgagagttctatatcaaccagcaccagagccaggtagtagagcgtgctccggcattggaatccctatcgccttatttctctgtaggtactttgatggctggtctatcgaaactgtttgatagcctgtacgggattaggctagagccagcgtcgatagcgcctggcgaggtctggcaccctggcgttcggaagctacatgtcgtcgatcacgcagacgaagcgggcgccgtgatcggaacgatttactgtgacttgtttgctcgacagggcaagactggaaatgccgcgcattataccgttcgctgttcccgacgggtggatgatgatgatctccagggagatcttccgcctggtcagacagattggacttttgatccaagaggtgggctgaacgtccagccggcagcaagtcggagaagagagggattgtttcagctgccggttgtcgtgctaaattgcgatttcggtgaggaatcgaattcctcgggtggattgaccttattggcatggcaggaggttgagacattattccacgagatgggacatgccatgcattgtatgtcgttcatctcatcttcttttctgttgtgaatccaaagctgaggaccgtttctttgatcctcctcctaagctatgattggtcggacatcccttcacaatgtttctggtacccgggtacctaccgacttggctgaattcccctcaatcttcatggaatccttcttttcctctccactcattcttccctcgcttgtcacccaccatagtaccggtcttccgccaccatcctcgctcgtccgagctcatcgggctcaacgcacccagttcccctcgcttgagactgccactcagatccacatggctcttctcgaccagcgacttcattcaatcactccttcttctgacaggtctgctgttgattcaacaaagatttaccatgatgtcactcaaaaggtcgatttgataccttctgtgcctggaacggcgccacaagcccaattcggtcatctgcacggatatggatcttcgtattacgcctatctttttgatagagctattgcaggaagagtgtgggaccaggtgtttgcccaaggtggacaggggatcgatggcttgaaggaaggcggagaaagaatgaagagagagttattgatgtggggtggtggaagagatccttgggagatggtcggtgggttgctaggagatgaagagatcaaacagggtggaaaggaagcggttgagaaagttggcaggtggggagtgtcggatgaaagatgacctttttctctgccatcttttctttcttttgtgttctggttcagtctttctctcttgcgcaggtctggtggaacactcagataagaatagattctaagaaattcgatagcaaaacatacaactaacggcgataaacgctttgctcttccactcgacgctcagtctacaacttggctgactgggttgtcttgcccatctacctcaataaatatggagttctcaaagaaaatgatcagccattgtcgagggaaaaaacggaaaaacagaaaagcctccgttcaagaaagcaaaaggaaagaacaaagtgagttcttgcactaacatggggctctcgaagagcggctacacatgtaatctccacatccgttccctgtggcagatccttgatctaagtgaagaaaagcagcttttgatcagaatttcgactagccggaattaagaaagagaacaggcgttcagagtgagtgagaattggcacttacaccgatgcatgttctcgaaggtggatccgttggaaaaaacggggtgtactaaattagtatgacatgagatttccggagataccatcacaggtagatgatcagtgagtggaagacgtatgttttttttttttagctacggaagaaggaatataagatcgactacggaactgacagctttattcatggcaccgaaatcttccacatagttactcaggtagattgtggatgacaccactgatgaaatcactcccatgtaaagcacgtcagcgcattcgacagagatgagaacccctccaagtctcttgacgcatcaggagagagagaatggagctcaccatcagaaagaccaagtcctacttcaacgagtctagtcttgatgttctccagagcggctctggctatcaacatgtcgaacaggattagatgtcgatcgctcgggattgtaacgtgaatgaggtaagggtgacttacttcgatcagacacagtaccatctgtacctacgccagttgttcccgataggtagtagagtttcgctttaggagccaaaatgttggacgaaaggaacggagggactgcgcctagagaggggaccttcaacactcatttaattataagggtaaatcataaatatcagttcttgtttgattcgttttcttcttgatgacaggagacatcgatgtacgttgatgggaaccctaacgcgctgtccagaaccatcattccgcttcgctgcgatgctacggatcgatttgttagtagaatggaatagaaagagaaactatgagcttatatctcgatcttcatattaagcttgatcatttgatgctaggtccatttcaagatatgtatcgacgtaccaggtaatctcgacgtctgttccgccaggaagtcgctcgagcccgatgcaagtccgagtagggaagggagatccagtggtgaatgcttgaatgtacgcttgattcatcatgttctgtgttgatttccgagttgtaaagagtttgagttaagaagagctcaacatcaagcaggcagtaaggaatcatattgatagttgatagaaaccacacttacgaaatcttccttgtattttgttagatataccgtcgagcttattacgtcctccaatcctagaccggcttgctttagtaacactctgacgttccctaaggccgacttcgtccgatcgtttacagtatgggcagaggatcctccatcctcggcacattgaccagaaacaaacacgagatcttggatgcttaaagccggagataggaatggaagtgtgtccggaagttcgggactctatttttgtttagaaaccaacggggagttgaacattgatatctgaggtatgagtcgacttggcctgtacaaattgcacagggcgctgttatagcgataagtagagtaactgggcgcacggtgatcttttgaatcggcccgtgagacttctcaacagcgatgctacatcatagagacacagtgcaagaagaaaagttccgagtgagtcattcgagactcaagcactgatgcgaaattatggagttcataccaggtaatctcgacatctgttccactaggaagggcagaggcccctacgcaagtcctagtaggcttgatatcttggggaaatgcttggagatactaatgacagaggataacgaatgagcttggagggataaacatgagaaacataaacaactttgtcactgactgcttcattcagagaatcgtaatcctgtacgtattttgagagatagacggtcgaggaaaccactgaaggtttatcgatgtgtcagcggagcgagaagaaaacacaagaatgagatcgaagatgtaatggacggcgtcaaagacgatatacagagtacgaaccatcttccattcctaggcctcttgcctgaagcagactctgtatcctcttcaacgccacggttgctctatcctttacgtcaccctggacaaacaccccttgttcgaccccacagctaccagagacgaacaccagaccagatgcggcgatagccgagctgaggaaggaaggcgcctgaccagcatacgaagtcttccaaaccaggaaataaagacgcacgttgagcgagacacgagcagactgtgggtttaaacatagaactggaatccttactgagaacgatatcttgtttggcatattggatgattggttgcgatgtgtgctctggtacatgctctctgggagcatctaagaatcgctgggggttacacacctcgccgtggttacgcagcaaaccacggcgtaattccagtcggctagatccggcgatgtttcggcccggtctaaacgccagtctaacgtcaggcttcggagctgtctcaaacattcatctttggaatttacctgcctcttttggtttctttttcgttgttcttctcgttttcgtttcattcttgtctgctctggcttctttcttcttccgtttctataactacctcactctcatttggttttcttgtcgctctcattctccttttaccatctcacggttttttttctctctcgtttctcaagatgcgcacccctctttccttggttctcagcctcctcatggccgttacttttgcctctgcattctcccttcacccacgaaccggtcggccacaccaaggcgcaaatattcgagagctgaccagcaacatccgagcgcgggacgctcatgttgttcccgatagagatagtttcaacactgcaggtccagttagaagggtccgcaaaagggctatctgcaacacatcttcttcgtcctcttcttcggtctccaggtctacgtctacgctttcctcgtcctcttcctcttcctcttccccggcctcaacctctatcaaacccagttcttcttcttcatcgacgtcctcgtcctctagctttacttccaccgtcaagtcttcgtctgccgctgctaccactacttctacttctactccttcctcgtcttcttcttcttcgcccacacctgtctcaacttctacttcaaaatccagttcatcatctgcaaccgcaaccccaacctctacctcaagcttcatcacgtcatcatcgtcttccacttcccgaactacctctacctctacctccgtgtctagcgcgacgaaaaccacgacttccacaagctcggtatacattgcgactgacgtcgcgtctgtcatcgctgtatggcccactgttactcagtcaggaagcagcccttcagctactgtaacttccaaagctggttcgtatctctcgcatattcttcactctgcgttcttgcccgctctctgcttatgcccatatatgccgatgccaataatttgtgtcgacactgggcctggtctcttatttgtttcacagatccatacgcacagtcactttcatacgcgctcaataattctgggaacaccttgttcacgaataagcgaacagctggagatctcacatactagtttgttttctcttgagcttttttttggtattctatgatctagatgctgcaactaaccgccaacctctctcctttgctttcttagtgagcaaggtcagacatcttgtggatctgtctatgatgatactacgtttaccgctgcggtttcctcactcctctacgacgcctggtttgtcgttcttactcttcatccatgtgttcctcaacatatcaactaaaagtcccctcttgtctattctttctcaatctgaactccatcaggcctggggcctcatccaacacgaatcgaaacccgatctgcggcccgttctctcctgggaggcttgacttgtcatccaatgtcaaggtcgcgtccgcttatggcagtgtgatgattggtggagatggtctgcttaactgtgtatctagttcgatgtgccgtgagtcctcctttgcttatccacccttcgctatcctatgtcttctttttttcctcaagaagaataagcgccgttatatctgaccattgctttgaccgatgtgctatatagatattccactaaccgccacgttgacatatagcgggaaatccgcaaaagtcctcatcgttgaccgatgtgaaggatgcgctgtagatgatgttcgtcattaccttttccctttcctctaagaatttcacttgaccgtcctggatcaatcgctcacttgctcatctgatcaattttctttcatacttgatggcacatcagattgatgtcacgccagctgtgttcaaatacctcactggaagcctcgatatcggtcgggtttatggaacgtccggaacgttctcttggtctttcgatactgctgaatagataaaacccctcatcgttccctttctccttttctctctgtagatgcctctgtgaggtactcaactcgcccctgtcctactgctttctctttcttttcttcaggatctggcttatcctatcttatcttcaccttgatctcaatctatctatataccaagcagaaagaaacttgatgttcttctgtcgccttctgtatgctcaacgaatattcatttaataatctataaacacaagggtatggataaaatgcgcctatcacatatctatcgtctccgatctggttcgtcgcgatccattatgtcttacgagcttttctcatccttcgtcgagggtgatgatggtgatgaaggagaactagccagtccatccagctgtttcttaccgacagagtattttccaatctttgccagactgtacgctaggcttttcatcggtccggcggtgatgatacccttgatggattgtaagagtgctggatatcgagtgatctgggatgtttctgttaaacgaatcttaatctatcagaaaaagggggcaaagaaaagttcggaaaagtcatagaggagacaacgctaaacgtacgtttgagcaactcggcggccaacgtctcgtcccctccaatcttcagccaaagttgcttctcttcttccgtactagaggattctctaggctgactggcatacttagttcggatggcctgctttaataccttgggtagtttccgggctagagacgcccggtgttccggcgaggtatcttgctgtatttcccattccgaaaagatgtgccgaacatttttagtcaatcctctgtcgattctgatggataggctttatgcttcacacaaaagtaaatgcctttaaaactcacctgaaggacatcgcccgaggatccggaaacggcaagggaaccaagctcgaccagtagacggccatagattccttggaaacggtccatctgtgcctcgacgatgttgaccactttccgagggttctctgcaccgggtatcatcatcctaggatcacctgatgaacgcgcgcataagccagttgtttaagagatgacaacaagacggcggaaacacaacttgagttgggtatattcagcctcgagtttagaacatcaaggaagaacacacctccgtaactgagcccggcaattctctcaaatagttctcgcttctcaaacttctcaggaagagtgagcagcgcaacacgcaaagccgaacatagattgacctgatgagctagtttgactctcgggtcatttcggatgatacgaatctatttataagatggatatcaaatgaaaagaagattgagtcttgaattccgggcggtggtcgaaagaaaggacgataggatcggagactgacgggcttgtgcatccgaccggaacagtacaacgtgtcccagttgatgaggtcttcgcacaacttgtcgacactgattactccatatttgatggtctaagaaatattccccctcgcccgaaagaataaacagtcgttaggaagatcagctttcgtcctggagatcactcttcgctgacagaatagaagggaaacgtttctcatggatcagaaagaagacgtaaggcgagtgaaactcacgaccccttcgacttcaacgtacgcattgtaccacacgccagcgccgcccttctcctgtaaccatgtgacagcgttggaccccaaaagcctcatgtaagctgggtaatggcttgggttctgctgcatattgatgctgtgaaagtgatccggatgcgtcgttgcaaacacaaaatcaagcatcggttttttctctgtagacttccttgcttcggcggtaccttcaacctggatattgctgtccatactagctgttccagggctgccattcgattgaggaaatattccggagccataggcgaatgcgtaccgaataggggccctgaaagacccgacgatggacgagagaacggtcagcgtagagtctggaagggagaccatctgattggacccaaagtttgccggaagtctggtggatgatctatccggttgatatagagaataccggggctgggttctcgagttgggctctgcattggagatgcggctcgggctgggtttcaaatgagtttcggttttgctgaagaagcggtattgtgagggaaaggaggtcgagggcgaggaaataaccccagaagaaatcagacggcagggcctgagtgtgtttccgggcgacaaaagatgcttggatctgagcagcatggtgtaagtacgatgagatggaagttggagagaccgagatatcaaaaagagaaagaagatggggaacgagtgaacggcgttctttccatttttatttttattctatttattttatttgcgattttcacttatgctcttttctccgctcggccggaagcatgtcggccgtaagttcaacagacccctcattccgagtccgttcatcactaggccaaagaaattggtacgcattcgatacattcacagaacagctaacatacctcgagctggtcgagaagtactgtgagatatacctcacaacaggcagaaggtgtcatcctagatctctgcctccacctcactcctccctttacctccgatggctcctcctaacttgtatccactgaccttatcccaatcaactttctgacgagtaacagggagagctcgtcgcagcctggttcaataacatatcacacaagtcgaagagattccatattagtacgatcaactatagtggtatgccataagagtcagaatagttgacgagaagagattaggacaaacgatttgaaggtcttgtctcctagctcctccagacgctcattggctccctcctgggagagacgctcgaccttgctgatctcagatatgatggccgcggcttgcgacggcccgaccggcggaagcgcgatggtaggtgtttggactgttcgcaattggacctgtaatttcgagagttaggtcgtcagcctggaagtgcagtcagcgacatgaagaagaggttcgcacgtttccttgctcataatagtgaacaactgcctggatttggccaatgaatgactctttctttaggtcaatgtcataagacgagcgccaacgaccagtcctaagtatcaagaggaaaagtgacgataatgcaagcgcaaattagtcaacacagatacagttggttaagcaacagaacattcaggctttcgcactggcgacttatgagcaagacataccagaaatttgtgggggagtaccggtgaccggatgtgacgatggtaaatttaccttcatcaacgcctaccgaacgacccgctggaacaattttgactgggacagcagatgattcttccttgtctaaagcagctactggaacatcaggcccctcatcggccacgtcagtggtgttggtctcctcctcttgattcacctgttgctcttccttcacttcttctttctcctctgccttctcctctttgacttcctttgtcgcttctggctcttcagggtcgacagactccgatacctcttctccaaccccgctcgtctccaagacactcttcacgccgctaacgactgcgtccttcaaagtttctaccaaccctggctcggcctcctcggtaacctctgccttgtcgttctgtccgtccaagatatcttcaactttttcagatgcttcctgtgacgacgagggaatctggaattctggtgtagattctaaaactggcgtagactcaggcgcagaggttgctggaatcggggttggatctggaaccggttcgttcaacacgagcgaaggaaagatgcagcctgctccgttactgtaatgattggatatataggtctggagaggcttttcgaatgatgcgctaatatcatcaaaaacgaaatattaagaggtttactcatgacacactatacaatatcaccaacgatgaatgaatagaaaagacacacatgaaggaggttgtatctttgggtagatctagaggctgcaaatctgaagcggtcttgatgtaaacgattcaagagacaacacttagtttttctattcagatgttcactcaaaaaagtttgagaaaactgagatgctcaccaaagagatgtgatcgaactcaaagctctgcccacttctcggttcgtagtaccgagatggctcgccaggtacaagcgccgctggagcgaccaaggtctataggtaagggagaacagttagtgaaataaataagtaccctatatttacggatcccaggaagcaacattgaccaaagtggtcgtgagttgagtctaaagaacctgaaggaaggagaaactcaccttgtatgataaacctggaacatcaaacgccacgaactgatcgtggttgtagcttttgacggctggtccaacggcttcgtcgaaagccttgtcatcttgaagcaaaagtcgagcatctgttcgcatcgatgataccaccacggtaatataggatgcatacaataacgacaggatcaatacaagctcatcttggctgacccggtgatggccagatcagagtctagattcagaggcagatgtgaatgagaacggaccgttgatgacatcgttgatctcacccggtggagcttgtcggatgaggttagaaaccagagcgactcgctccacgacagagagttgagggacgtcttcttcttcgtacatagattttgatgggagtgatgcgatacggctaaacaaggtgttaagtggttgatggctgtagcgatgctggtgatggaaagatggcgatcggtaattgtactttgattcgtagccgcttctttctgtataaccacaacatcggtgctctctcccttactcttctagttcttcagctctctcgtgagctcgttcagctctctcgctcgaccactgctgtcagttatggccaacattgagcaatggtaagaaccgtcttactatctgtcactggtcaagttgttaatctcgcgctaatcgaccgtttcagggtgatggaaatccctcctataactaggttggtttgatatacacatacctgttacctctatgccagcatttatctgacgatcaaacatctgttttgttctagagcatggatcatagcttcggtggcgatcagtgttggagtggtcagtcaatccgtatcgaattcgagtgtatgactccactctaagctaaacctcattgttatgcgccggctgccagcaatgtcaagtggtctcgccttttcatctatacttctcttggaaagcaacgttcggacaccttcaggtgcgtccagtcttatttcgtgactcggatattcctggaagaggacctactgatgatgaaatactccttttgtaaaaagttatggaggctgatcagcaccttcatatactttggcccattatcaatcaagtgagcaaatcacatatgtattcttttgtgttcctactagacgatttctgatactgcttcctctcggtatggctagcttcgtgatgcgcctctttttcatgtgcgtaaatgtctgtgagatttgctacacgaaatagaagctatcgccaacgtcttgtccatgttctctttttgtagaatgcgttactctcgtttgttagaggagaattcatatgcgaaccgtaaagcagactatctctggctgttgatcgtgtgtagtttgttcctactcgtgagtatatgtatccttatgtttgcgaatctgcagaaactgctcatctacgttctgacgacatttctcgttttgtagctcatctctcctttattcaccataccaatcttgtccggttcattaggtatgtaaaataagggatgaagcataagatgaatttgtattgatatttcttccaatgagtagccttcgcgctagtctatatttgggccaaacggaacccaaatgtcagaatgagtatgttaggggtcatcacgtaagttttttcatccttttggctactatcattatatacctgtagacgtcttggaggcacgatctgatcaagaactatctacacatgcagtattccggcaccttatgtgcctctttgcctcgttggcatctcgtggattttgtacggaggaagcagcgttgttgtagtggctgatggagtaagaccctgttaaacaatttccttggtctattcactttccagatcacttactgacatacagctatctcattcgaaacctatggttctcagcttggacttctggttggccatatctactactttggtcaggacgtttggccaatggagatgtcgagctcagggaaggggctatttgagacacccaatctgctgtatgtctcactgtgtaattctttctaccttcataggcatcaactaacatgggatcactatcccgatggcccaatctcacagaagcgcattggtagacggcccgagaacacagaactagcgaacgtatcgtaccgtatgccgatctatgtaattgtttgacaacgagtattgagagtgaggtgtggtacaaatgacgtggcagttgatattagggttaatgtcactaggcaaccgatttaatctcctggtctttctctccatcttgtttgctctgacgaacgtatgagttattcgtcaaccatcactgtcccttttctctctcttctcgattgaaagacagtcatgtcacctattatagagtttctggcaaccactgtgccgggcaagctccgggacttggcctcaaatccgtctaccaactacaaaggatttgtactttggttcagctttgctatgtgggcatttgaaacttacttgatgtatgtctcctgatttgttcttaattcgcacggtcttgcttgagtggagcagttgtttgcatgtagaggctgaaaactcacgctaatacttccttgtgatcgattggtcgcctgtttttcgatacctctggtaaattaaaaaaaagtcttcgacaactccctctatactcgaagcctccccctcctcatgctgctgatctcactccggaagaaatcaaaaaatcccaggactacggccgagacaaggcatggctgtcgctctttagtctcgcctggagtcaaggcactggcgcagcgttggtctactttgacgggtttgcgaagttctgggaactctcgacctctatcgtgggtcctcaaagagaattcagcgtgagtttccccttctccctctaagcggggatcatttgaggctgatttcatcagaatgaagagttacgacaatcgtactaaacaattccgaatatgatcgactcgaactagatcatcaattcacttctttatccgaccattctgacggtggcaatgacgctaccatcgatcccgctcagtctgtattcgacctttgtcgtcgagcagcgccatggtttcaacaagtcgacatacactctcttcttcaccgacttgttgaaatcacaaatcttgactgccgccatcggtctccctctcctggccggattcctcaaaattgtcgattgggcaggggatgggtttgtcaagtggctcatgatctttttgtacgtgatcatcataccttgcttcatatgtgtgcaaaccacaattgcgtcaagtctcatccgggtttccttatttctttaaaataatcacaggatcattgtccagctgttcctagcaaccatcttccctacgttcatccagccgttgttcaacaagttcactcctcttcctgaaggtccgatccgagagaaggtcgaggcgctcgctcataagctcaagttcccacttactcatctatatgagatcgatggaagcaaacgaagtagtcactcgaacgcgtacttctttggtctcccatggtcgaagcagatcgtgatctacgacacattgattcagaagagttccgctgaagaggtagaagctgtcctggctcacgagctcggccactgggcgatggctcacccatcgaaactcttggtgatgacccagttccacctgttgctcactctatccctgctccatctgttcctctacaacccgcatttgcttcgatcgttcaacttccctgaatccactctatcaaacccacctgtggtcgtgtcgttcttgctttctcagttgatcatgtcaccattggatcaagtgttccagttggtggtcaatattgtcactagaaaattcgaatacgacgccgacaagttcgcttgtcatatcggaggagaagagatgggtgaacagttgaagactgcgttgaagaaactccatgtgacgaattctgctacgctgaataacgattggctgtaagtctgttgaacagccttgtttctcttgatcgaccgttgctaaagtatctgggcgcttctttgcttctactgggcctatacatgatcgatcatagatactctgcataccaccacaaccacccaacgcttcctgaacgactcgacgcaatggacgctcacatgaacgagtattttgcccaggaccgacacctgaggcttaagcaggagtctggcacaaagtcagagttgtaaagagaaagaagggtgagacgactatagatgggggttgtgagcgaacgtaaggtgcttctttgtaagaaggaacgagaaagatatgcatgatagacttatacaaccgcgctgtgtgtttagacgacatcaccccatagcaggcaagcggaaacagaagaacagactacaacttgatgaaacagatattaagagcaagcgaacgatccggaaataaaggaatagagagattctcattgcttgctctttccggcgttggcaagaggtccttcgacactgtgaggtcgcaagatcagagaagtggatcacatggttgagtatgtctagctccacactcgagtacagtagatacaatgagatcgaagaagcttgactgacgtttctttggtctcgttgctgcttctggcctgggaatcgacattggcactaccagactcattcgtcatttctccctgcttgcctccttgtccagggagggcgcccagtccttcgggtgcaacctccgtctgtttcatcataaccacccgcatccaaccatcagtctggtcagtttctagacaaacgacggatatcagtttccgaagagccaaggatacgaacggtgtaatcagctggctggtacggtcctgcctggttgctatcagtgcgatcagctgtagatgcagatacgttctgctttgcaggtggcttagaggcgtatgatcgggaggcggccgcctcgatcgcagggactcgcccgagagaagcgaagagtgatcgtgagaatgttcggagagacatgatgagaacggatgtattcaagacggattgtgtatgagatgcgggacgctaagagattcaagtggaggagaaaaggaagtgtgataaaattgcgctctcctgaaacggagctagctttatacattttatcgatcgcttcctaacggctatgatgatgagtggcagcagcaagcgtcattgggtgtaatctaataagagtatttgattgttatctaagattacctatggtgtacggtgatcccgcagtcagacacagatctcaccaggatctcgcttgtcgttcaacctcttctggatagatctactctttcccagtctctctcgttctctttcagtcttccttgacgtttaaacctttgtctgttacttgaatacatattggagatgagttggtgagtctggtttctagttcttctttccttatctctttgtgtttgtgatggcgtttgctgatgtacggtgctgctggttctgttcatgtaggaacgggtaagcagaattctagtctggtcgtgactatcgacaccctcctaatcctttttggttcatgcttcatgtgtgcctcttggggaacaaaagattgaagaagagcttgtaagtgtgcaacattcattttcctaattatatcctaattctctctttagctgacactgaccgcgactttggaaactgtatcggtcgttcttagtaaccgagctggaacgacgttgatgcagaagacgggtcaggttgatcgaactgttgataacgaatttgatagtgaagttgcaaagtaccgagtgtaagtcctatccatatctggcttctccagtgtagataagactgatggaggtctcgttggctttggctgggaatcctatcaggctcgagaaggagctcaactctttacacaaggatgccaagtcttacttggatgctatgcgaggtttgtgctcttcccccttgatttgcgtagcattctgttgattatccgagtgactgaatctcacacgtcgtgtttgagaaacgctagcgatgacctcgtccgaagctcgactggccgagacgatcgagctattttactctgctgcagaactcacgtcggatggagcgatggccgggcacgcttataaacgagcggtcgatgagcttgacactggtgtcggtagagaccttgttagtcctttatatcatacctggtttcatactcgacccagcggatgtatgaagctgactggttcggttggatggatatccactgatggtactttatcttggatcccactcatgttcaggatcaaccatatcgacacacagtgctcgagcctattggtagattctgttcgtatttccaaatggtcaatgccgccattgagaagaggaacaagaaggtacgtctggagagttggttcgaatgtgattcttcatcggagacgtacttgactgactgactttccttttcttcttcttgttcacgtagcttttggactatgacgccgcccgtacacggatgcgtaagctagcagagaaggggaacgacgatgtcaccaagctaccacgtgtatgtgacttatcctgtcgactttttgtacttgagctttgggaggaggacgtcttcagttagaagctcaaaaccgatttcaaccttttctttccctataatccttcccttaggcccaacaagagaatgacgaggccgaggcggtgtacgaggtgatgaactcgacgttgctcgagggattaccccagatggtggaacttcgggtaccttatttggacccgagctttgagtcgatggttcggtgtcagttgaagtttgcagaagaaggttacgaaaagatgagcggcgtgcaacggttagtttgctttgtttcgtctggatggggagaaaaagaggaaggagaaacactagatgcaagagaatggaagaaaaatggctgatgggatgttcgtctttgtggcctattagatactttgcggacaacgttagagatgaatacgcgtctggaatgttagattctcaggtggagactgtgttggccgagatgaaggatctctcgatctacggaagtggttaatccaggagtattgtggtgtatttttttttgggctccatcctgttcagccgtgcgtgttgtcttatgtgttgtcggcccaagtgtcttttgtcttttgtgatttatgtttcgcccactctacgctcgcgacacgtgaatctgttcttttttctttatgtttcacaatcttatcgtttggttgagcatcgcagtgcgaaaaaagtatgcttagatagacaactgataagcaagggcagcaaagaagacaggagtcgggaaagaagacatgaagaaaagacaagagaggaagagaaaagtaactgagtggttcttaggacccaacggacacgggcgcgtattgctgtctagtttctggctggatggctgatctgcttgggatgacgtcctgttttgatggttgggatcaaaattgtccataggaagcttgacggtcagtccatctctctcttacgaacagcatcaagaccaacacaaagaggaaaaaagatgaggagcataccttccaactgctgaatcctctaccaaaactccaacccaacctttccatcctaggtcttgcgaaagcgacgagtacaaggccaaatattatgattatgaagatcgtaaggatggcttgatctcttggcgagcctctctctgtagtgtgggtgaaggttgtagcagggagagagcaaagaggcctaatcaggatctgcctggattcgagcttgaggacgaaagtaaaaggagtagaagcgcatgaggaacgaactgaaacatctggcctcgacatcaccttcggtaccggaggtgatgtcaaggttaatgtgacctagggaagcgtctttacaaatcggcagtttctggtcctgtagcagttgtaagccagataggactgtgttagattataattgacgttcactttgaagtaagagagaagagagagaaggaaaagcagatgagagaaggtcagatcgactgacgagacagaatgcttttgtacaactagcacaggggtgttttcgatcgttcggtaggtagagagggatgattgtcgagttttggaagcagatacatttacagtatgtcagttccaactgagttgttgaggctgcattcactggttggacgagctatatgagaagtgtgtctgattagtttcgaaacggatctgtaaccaagcaagagagaacaggctaacgagtgaaaacgacagaaagagaaagacgacaagggcgagtggtctactcagcatgatcagcgagagtatgttagtttgcaaagtgaggtatctaaggtatctctttccttcctgggaaccaagagatcaaccaaggatgtaaacggctcaagccagagtcgggctagcccgctcatgtgtacgtaagtgaagtggttacgattacaaccccaattacatgcacagctccaaaccccgtgtaaaaaatttggagattttcgatcggattctttcgcgttctttcagcagaagaaaaagaaggcgatggaaaaaaaataattaaaataaaaaatcactcgaggtaattctgtagtgtcaagttccagtcagtctaatacagtcgactatcaatcgcaccctcatataccccgacacccacccaccaacacatacctaccacccaccccatctatccctccttttcctttctttcttttccctttctctttctttcttagactatacaaaaataatggtatgtcgtccgggttctcttgagtttgatgttctcgtgctgtttcgttctttgggccctgtctgttcagagacgaccggttgtgttcctatcagggctgatttttttcccttctccttctctctttcctggtattctcctttccccgttgtgcgtttttctcttattcggtcaaccaattgttgggtgtatgctatcgccaactaggcttccgtcgtcggtcttgatcttggaaacgcttcctccaaagtatgttgtgtccaagcttctagtgtatgggtttactgcaaaattcggaatacttaaattcaatatctgccttgcgtttctttcatcctcttgtctagattggagttgctcgaagagggtccgtgctttcagagctgttctcatgtcctttcgtggtctgatccacagcttaaggaacaaggaattttgactgacgtgtttaccttgctttgttcaatctctcataattaaaatcctatagaggaattgacatcattgtaagttctgccacgtcggcgcttttttttttccttccttgatctcttttgccccactatctatccccgtgccgactcgaggcgctttcaaatgcaaagaaagaacataacatctaatggacacgcttcgttttctcttgctcacaggtcaatgaagtctccaaccgagctactccgttcgtattatttcttactcttttctcttttgttttcaagcttctagctaacgtcttgttgtttcttatgccattcacagttctcttatctcattcaccccccgacagcgatacatcggtgaggccgccaagactgccgagacttccaacttcaagaacaccattggatccctcaagcgattgattggacgaaagttcgacgaccctggttcgttctcgtagttttatatttctcactctttgtcgtctgttttctgaccaaaatacaaaccacaacacgcttgtaccctcaatctcttcctcgtgcacacagagatccaggagatcgagaagaagttcatcaacgctgagcttgttgacgtcgacggaacagtcggagtgaaggtttgtagaaatcgcaaccaacttgaatcctacacaaatatatatcgaattgacacgacattttcttcctcatacaggtccagtaccttggggagcccaccacgttctctgccacccagctcgttgccatgtaccttggacgacttcgagaccaggcctcggccgagcttggatctgccgtttctgacgtcgtcatcgccgtccccggatggttcactgacatccagcgacgagccatgctcaacgccgctgagatcgccggcttgaactccctccgattgatcaacgacttgaccgctgtcgccctcggatggggaatcaccaagaccgacctccctgagtcgactgatgccgccaagaacgttgtcttcatcgacgtcggacactccaacttctccgtcgctgtcgccgccttctccaagggtcagctccgaatcctttcttccgcttacgaccgacacttcggaggacgagatctcgacttcgcccttgtccagcacttcgctaaggagttccagaccaagtacaagattgatgtcctctcctcccctaaggctatcttccgacttgccgccggttgcgagaagctcaagaaggttctctccgccaaccccgaggcccccatcaacgtcgagtccatcatgaacgacgtcgacgccgcctcgaagttgacccgaaccgagttcgagggacttgtttccgacgtgctttcccgagttcaggcccccattttgtccgcccttaaggacgctggtgtgaccgccgaggagatcgactctgttgagctcgtcggaggatcttctcgagttcccgccatcaaggagcgaatcgccgagctcttccccggtaagaccctcggagccaccctcaaccaggatgaggccatcgcccgaggagccaccttcgcctgcgctactctctcccctgtcttcaaggtccgagagttcgccgttcacgatatcaactcttaccctatcaaggtcacctgggccaaggatgacgtcgttgcccccggagacgatgacaccgagcttttggtcttccctgctctcaacggtattccttccaccaaggtcctcaccttctcccgaaccggaccattcgatcttgaagcctcctacgccgagccggagaacctgcccggaaagatcaacccctgggttggccgagcttcgttcaagaacatcaagcccggacccgacggtgagcccgctaccgtcaaggtcaaggccagattgaacctccacggtatcctctcctttgagggcgcctacaccaccgaggagatcgagaaggaggacacctccgccccggtccccatggacactgacgccgcccccgctgttgacggagccgaggccgcccccgaggagcccaagaagaagaaggttgtcatcaagaagaccgatgtctcggttgtctctggttacgccggacttgaggagaaggccgtgaacgagttcagggagaaggagggccagatgggtgcctccgacaagctcgttatcgagaccgaggagcgaaagaacgctttggaggagtacgtctacgacatgcgaggaaagcttgaggaccgatacgccgcctacgttcaggccgaggagaaggagaagctcctctccatgctccaggacgctgaagactggctctacactgaggagggtgaggacgccaccaagtctgcttacgtcgccaagttggataccgtcaaggctgtcggaaaccctgttgctctcaggtacactgagtctgaggccaggcctaaggccgcttccgctttgagggaggtcaccaatgacttcttgcagaaggctcagagcggagacgagaagtacgctcacatcgatgccaaggacatcgaggccgtcattgagaagaacgctcttgccgcctcgtggttggataacaacatggctaagcaggccgagcgagcgaagaacgtcaacccagcgatgacttctgaggagattctcaagcgacgagatgaggttatgtacttctccgccggtatcctcaaccgacccaagccccgaaccaccgtccctcccaagactgagactcccccaccgaccaaggagaagaccgacggggagccggaggccgttgtcgaggagatggacgctgatgagcttgattaaataattcaaagaagaaaaaaaccctcatcgggctccgccgctcctgtgctttcgcatcttgtcccatctattgaatgttttgtgtatcccttacatacagaccctccttaaccctttctaccttcatctcacaccgcttttatttcgacagatttgtgtctcgttatattttcttgttttccgctatctttctccgacttgttttttgatgtatctagatgatgccttgtttgtcagaagggagcaaaacgaagcgaacagacatgagagtttcttctggaattgtttaacaggataaacacgtcgagaagaaatatacaaaaactcatgtaaatctgaagcaagagcgagaggagctaaaagagagattgtactcaaaagagaagacaagcaaatgatacaagacaagacaaaaaaaagacgcaaaggaactcaacctaacaatcttaaagcttctctcaactctttcctagcggtgtcgccgtcttcgtaattaagcgcgctgatcgcccacctcgcgtgcttctgagcacgttcgatcaactcgatcgttaattctactggttcggttgcagttggcggcggcggcggcgg

SEQ ID NO: 3137 - DNA, 41534 bp, Xanthophyllomyces dendrorhous
ctgcatttccgtctgcgttcgttggctcggaaccgaacggttgaggtggagaaggaagtctggggaggtcaccgtcaatgtcttcgtggtcgacaacgacgggtgcggtggaagattcttctgattcctccctttcttcgttctcctgcttcttctcagcctcatcatcctcgtcaccttcggcgaaccggactttgagattactggagtctcttcgttttctcgcaaagaacccaccggtcgggggcagttccccacccaaagccttctccacgtcctttctctctccagcctcggtgtcatcgtcaacgatcacaatgtcattcgaacctagggatttgtccgactcatcaatccctggagaagcggcattactccagctcgtaaggtgtctcgcttgagattcctcttcttctgtctggtctatcacaggtggtaagattggtggggacggaggaggaacagggaaggttgactcgacggtcgtctcagttgatgtcggaggtgggccgggttgaggagtgatgcctgctttgaatgctttcgataaagaagcagctttaaatcgggcatacttcagctttgcctccatctatgtcgacaaaggagaaacgagaatgggtaagtgtgaaggatactcaacggatgagtgcgagggaagatggagcttacttccgcatctagttcgccgtctccaaacgacttgccaacctcgatgaatgtagcagccgctaggaatgatctcacagtggccctaggtttgagtggaaacaatgaataacagatatcactcttagcatttgctggtcttttcaagtttgaggagaagaggacgagtgactcacggggttgctttgccttctctgtcttgatcgtctgcggtggcgaataccttgagcgcaaagttttctacgtaggcctggccggcaatctcattcgtcaccgcatcattgtctttcatcaaattcttcatctaaggaaagaacggtgtatgaacggaaagttagatttgggtgtccttgattgaagcaggctcggagaacatcacacttacaccttcgagcgcgtccagcaaatcaagcagagccaatgttccttctttggttctcttatcagcaactccgacctgagcagctctgtagcagcctggcagtcaaataacacatcacataccaagcgcgtcgtacccttcgatcagcaatctatatcagctgcaaagagcaagcaatggagagaggggtgcatacaccagtaacacatcacagggtcatgcgtcttgagttcttttgcccgtttcagcagaagatccgccgctttgagttcggccggtagagattctggtagcttgatcccctgcatgacgtctatcagtcgagaataagtgttgtatgaaaaaaacacagcgatggggatgagacttgataagagattggatggagatggccagccgggggcgaggcaagtgggtgtgagtgtgagtgtgaggtgggtaaccatgggttaccgaagatcacgtgatgactcaatcgatcgaagtcattacatcatcgatcggttcctggttccttgttccttgttccttattttccatatcgtcccttttttctgtactttttccatctccttcccaacttccacctcatactcttctcgttcatctcaagcaaccatctcgttcttgttcttgtccttgtcgttctgttaacttttatatttaactctcctcaacatgtctgtgcgtgcgctctctatccgctcatcatctgttctcatctccaaaccatccatatcacctctcacatcgtttctcgttcggtctctcgcatcgtcttgctctaaccgacctacgtttgctcacccgcatcgatgcttgtcaatcacccgtccaatcgcgtccacacaggctggccaagatccttacaccgctgtcaacaacgacgaccctaacgtcaagcagtcagtggttgttttgtctcggcgagaggcctacatcaaagtcaatcgaagaaaccaatgctgatttgtttgtttctctttctcttgatcttgtctgcaacaggaaagttgacggacttttgggtgttatcaagtctgtcggagtgagtcggttaaactgtattgactggtatcggtagcaacttgcacacacaagctaattctctttcttttttgagtaaagactgctatgcttacaacccgagcgcccgattcggaggaacttcattcacgagccatgtacccttgtacgtatcgtcatgcggcactcatttgtttttatatgtggtcaaggaaagctttgtctcacgtttatctctatcaatcttcctcctcagcctctatcgaccacctgaagtttactttcttcggcaacgttgagagtggcaagtttgatggaatcgagaaagacaaggtgtgtatctagacatcaccaatgacatctttatatattgaggctttccaactgacaatcggatccgaccaacaaacgtcagcacgtcaacatctcatactacaactcagataacacttcttgggtctcgatcgctggtgttgccaacatctctaatgacagagagagaatcaaggagctttactcccctcacctcaaggtgcgccatctttctcatcttgttacatcaggtacgaccgaagcgtgctaatgaagtagcttacatacgactgctcaggcctggtttggtgatctcggagatggcaagcacaccggagaggctgacgacccaagaatcgaactaattgagggtacgttccatacgtagtcccaaccttgttgaatagataggcgcttacctctccgtgtcattcaatatagtcaccccaaaagagatccgatactttgtcgagcagaaaaacattgtgaccaagtcgatcgatatcgtcacttctgccgtcactggctctgtcgctcaggttcgtgttcggtttcgtacagccttgcggcgttcgacgcggaaagacggctgacctgacacctcatcttcctttcttgtagcccggaaagcttgtcgttcttaacggtcacgagcttgaaactgccaagaagattgttggggccaccgtgaaggtataagaaactctgaaagccaacaccgacataaacctgtcgccatcagccttgtgttcaatcgttcatccctctgtatcgatatcaattctcgtatgcatttgcactctgtgtgagatttaaaatccgaccgatctaagcaaaagtcaatactgtagagttgctgagtaagaagcagggacatattgatatttgtattaaagctttttgcattgagatgaggaaaaagaggggttttatctattccttgtcattcaacagatgtgtaaggacggaacaggatatgtgttcacatttacaagtcaaagaacgactgtatcttagtacactccaggaataaacttgtacttgacgactgtgcaaacaaaccgataccaggcggtcagttttgttttgatctgtttccaaccctgatccttcgcagaaagagagaccaaacgcaacgaaaggaaaggactcaccggccatgtaacgatcccaatcctttccgtacttggctgcacacttctcaaagtctcgaccgcatcggtgaacgaggacgatgatgaaccagacagggtagaactgtttttcggttgatcgaacgaatcgacattcggtgcgcccccatcaaaaagaaaggaaagaggaagatgaaaaccattaggtcagttgtcacgtttgcgtgaattttcgtgagatgtttgtaaacaaattgtctaagtaaacgcaaagacgtacgtaagcgataggggtggatagaccggtagagagaccccaagtcaaggattggattctggaatttgagagaaaaaaaggaggagagatagcaaagagagcggtggtcaggaataagagaatcaagaaaagcttggccaacggaagaactggcatggacttacagatcggcagtgtagtgctaatttatcaaatatatattcattcaagctcttagttcgaaatcctgagaaagagaggatattcgagactatcgaaaagtacgtacaggcttgacggcgaatctgattaccaaaaccagcgcagcacaacacaattccaccacaatgatttcgatcaacaaaatggacgttaaagaagaggaactcaggacggatgacgaaaagaaaaactgacttgtaccagccggaagtaagaagcttgctaccatgctgagtctggatgaaagtcgggttgttcacccgtctccaaggtagttgggggaacgcttttcgagggacgtagtctgcgttctgctccatccggaagatagatttctgggagtttgctagatggaaaataaagcgacgtggtagggatcaaagtaggattaaaagggttagacttgatacgattcagatatgcaaagtaacagaaatcaaggaaacataccggtatcgaaaatgtagtaggataaaagaagcaaactgaaattcgtgaaggagacagagaatggaagacaatcgcttcagacacaacagtactgacatgttcaaaaaatagagagaaggaaacacaaacccaaagagaccgaaagtagcaggagttgacatcttgtagacctcagggttggttcgatgaagataaaggatcgagtacgagtatgtgaaaggactgtttgggcgaacgaataaggagaagccaaacagtacatgatgtcagaccaacgtattttgcctagtcttcttcagctacgttcaactaggacatacactcctgtgaaggatacaaaggaagagggggggaaagagaaaacgatgagcgtcaattttgaacctcgccagaggcaaaaagataggtaagaaaataaaaacgtaccggcaaagttccagaaggtcagcatgaatccatccttctcgtgaatcatatccatcgtagtggggatcatctcctctcctttagcacacgcgtttatatacagcgcggtggccaaaagcatgaaggccatgttctgtttggttatcatcacaaatgaaagcaggaaaggagcaggtatcctggttatacgtagtcgtcgatgtgcagcctagtggaatagtgagagaacgtacggcagtgacatagccgatttctcgatattgctcaagcgtggcagagagagcaatgaggaagagaagaacccaagggattcggacttcctgccacatcttgaggtcaaccgagccgattcgagggttgagtgcagctagagaaacaagtcaagaatcacacacgaacaaagagttagtcaaagagggtcaagaaacgtcgtatagagaagagattgtacatacctcccatgaaataatcgtagaaaaagtttccgctcatccggatgggctgtcctccccagcccaagaaaacagaaccaaagtacacagcggtcgtcaaggcaaatccaacgatcatggcaacagtcataagtggcccaaagttgtcgatcacagtcgtcagatcgaaaatgtcaaagtagtggactatcccggcggtgaccagggtaatgtaccaacagccgatggcattgcagtggtagaccaaagttttgtaattaagcgacgcaacgggaagacctggaatttttttgacaagcgatatgatatgagctaatagtataggattgagacttggagaacatccctaaccattctgctttttgccgggaacaatgaaggcgagtatgagctggaaagccatgagtccgaggtatgacttgaccgcccaagcagtagggtacgcatcctaatgagtcgtcatcgtcgagtatagtaacgatgcgaaggacgacaccagaagaatggagaacggttgaaatcgaaagagtgagccaagaagtgttattcagttaacgtggtcaaagattcgtggaacaacgcgccgcaacacgttcttatatcaaaaagtatcgaaaggaaaatgacaatgatgaacatacctctcggacatgcgccgccatagttcggaggaaaggcttgatgtcttccacggaagaaggatggacgaattttccctggtagaaccagagacaagcccagaggtagtctgttgtccatagaccgatgttgaaccgaagcgcgtacccaattgttattaaacgcgaaccgaagaagaaaaaaacaacagagcgacaataaccagttcatgccgtcacgaagaggagagccagtaaagatcgagatgaagctcatcagttctcttatccgcacaaacacgcatctaataaagtcacaaaaggaacgcacacatcaacatggggaatccgaccatcatcccgatcactccgggcggtcctccgaactcgtacttgtggtgggtatctccttcgatgtccttctttctgcctgcctcggtcggaacgaaacgcccattcgaattggagacctggccatttgacgatccgtttgcctgcttgcgctgcctgacttctgaaggagatcctgccatcttgtaaaggagaggatcgagtacaagttaagagtcaaaagtaaaaaaaaaggcatcaaccccaatcggagggaggaaagttaaggtacgatggctgggcggggtctgttgcttatgtaagcttaaaatcacttggccgatagggtcactaaccgtaaattacattgtaaccaccatccctccgtcttgtaacctttgtcctccctggatgcttcctaccttctccttctacccttgcatcccatcgaccttcactcacactctgcgtttcccagacaaagatgaacaggctatcatctcgtctacgagcaccgaagctcccgagtgttcatgatctgccggtcatcacttcgccgaataaacacatcgtcaccttcaagaagcaatacccatccggtcctcagatccagcaggtccgactgaaatacccgtacatgtccgctcagacattggccgattcagtctcgttgcattgtcagacgaacaagtcctcgcaggttctggctggtctgacccaggcattggggaacgttgcgacaggaaagttggctagaccggtgacgggaatcaagatcacgatcggaggagtgacccatgtcgagaaggttcgttggcgcttctttccttccttttttgctagtttcttctgctcttcagccttttctcttcatgatgatcgtcacttgatttgaactgactgatcctctttttctttcgtattcttttttttctctcattcactcatcattatacctcagaataaaacaacagtcgttcagttcatgcgaggcagtctcgccctgggaaaccgagataaaaagaagacgaccagacacggcaagatgggtatccgaaccacgcaggtcacactctgttcggccgctttccccttctagtttacgcacttcaagaggctgaaggattagagagtatcaggggaaaaagaacatggtgggtagactttgatgggattgaagtcaaatacgggtgggaaatatagtatgatccttgtacaagatcttggtactttcggtcaaatccaagtccgatgggtgtgctgtccgagcttattaaacatcttgaactgaagactgacctctcatgcagaaacagagacttgacatggtggtttctctcattccaggcaagcaacccattcagattgaccgtttcctgttccccttgtctctccaatcacgacttgtaaccagactatcggccatttcgagaaagcgtatagccaaacaatcactgcccaaacatctattctttactaggccgtttactatgaagatttcgaagtcttgatatccagtttacacgtacaaacagaagaaggagatagatgaagaaggaaactaaactttcgcgcgaaaagagcacaggagaagaaaaactacgagatctactcttccatagcgttcgcctccgcggcaggagcaggcgcagaagcagtagcaggcttatagacagacgcaaccaaaagaagaaaagaaactggtagttagatgaagaatggatagaatcaaagatcaacagaaacggatacgaacagcgtcactcttcatgaaagcctcaagttccttgtccaatgcatcctggttgaccggccccctctttgaaccctttcctcttcctcctcctcctcctcctcctcctcctcgtccaccccgggcttctctaccccctcttccagctccacccactcgaggagcggaaggtccatcagttcccttggggttagccgttcgcggtcccctactttctctacctcgactgtatttcgataatcccccagcaaaccagtcggtccaatgagtacagtcggtcctatgaactctatgaagcacgtgattcgtacaagagaagaagaaaaaaaaacacataaaacgtacgtagcagcgggcgcatcagtccctccgactaagcctccgagtcggccaaacaggggtttcccctcagccggtccggtggctcggacagttccaggtcggggcagtctgacaggcgcgtaggtgatcttgatcggttcgcctgtccggacaaagaaaagagatcagtttggatcatagatcctgtatcagttgatgatgatacgtaccgttggccttttggccatcaagcttttcaaatgcaagcttggcgtcggaaatggcggcgtaagtcacgtaagcaactccggtagaccggcctgatcgatcgtactagatgtcaagtcgaagtcaaacaacgatggtatttttctttcgtcagaaccaagtccacgaacgaagacgaaagagtgtctagcgaggctcacctgatgacgcagaaatttaaagtaagaacttgcgtcactttaaaaaggttctttcttttctctctgggattcccatcttttgttctttaaattcttgcccgagatccaacgcaacagccagcacccgacgcgtatgtgatgagaagaactgagaaaagccgacacaggaccaggtccactctctagacgacaggacgaaagaggcccgtaatgtcttatctcacaatagagtgaaccagtttgaagacacatggcgaaatgacaagagaaggaaatggtaggaggcagaaagtggggatagctgctggtgctggtgctgagttggatctcgactggtcaaaagtggggggaactaagttcttactactatcgatggtccttcggcgatcttgcctgcctgtgcaaagattttctgtaagggttgggataaccgacaaagaacgtttcgaatagatgtatcatatgagcctacgacgcgttaaatccgagggaagtaggaacatacgaggacatacctcgagctgaaagttttgaatctcatagtgaaggccctcgatcttaagcttagcggaggggttagtctgtgaatcagaaccgatctgaccgccttgtcggccaccttttcctccgaacatatcatgtcgccacggggcgtcggtcgaggcgggaggaggacgcttgaacgagagatatccagcaagacaggtaaaattcgggtgatgaaaagataattatagaacacaacggtgacaaggagttcaatcaacctggatgccaactgtgaaaagcgaaaggaacatacagtgtatggagcactaccggccgctctatcggctcctctgccagcgcctcctctgccggaaacagttcgatctcttctagctggacctcctcgagcagaggtgttggatgttttcttgttcttggacgcgaggtcgtcgagggacatgtcgatatccatggctgctgtatttataattgggatagaaacgagagcacaaggaggaggaaaggatgaaggaagagatgggtttcgatgatggttgatggtgaacaacaaagtgagggttttcccgccttgggatttgtctattagaaatttttgtagtctttttgtcatttgttctaatgctcatctgtagtcttcaccagacttgttcagagcaaacgtagcagaacacccacgacctgttcctcgcatccccacgttcatctcgacatgtatctgttccaggatagcaaggataatcgaacatgataatgctgataggctggatagggaaagcttccatagaatcgctaattctctctcatctgccttgctatgttcacgtctttgtaatcacctccatttctcacaaagtttctctgattactcttcatcaatcagttcactcgatggctgctctgcctgatcatatactcatgtcctccccgctagcgcttgttgccaaactcatgtatcctatgattcataccatcatgacttagccccgaggcaacacaatgctttgggctcaggcgtccgccgggttagtaacccgttgggtaaacagtctgcatgtgtccctcgatctcttcaccttcccttctctttcggctcgtccttcgacagcatcccgagttatccatcaaggaagaaggacaaaggatgaaacatcttgctctgagccaaacaaagaagcagacccttcatgaacatgttaggttcattcttgtcgccgagtttgatattgatcaaggctcgatcatcaagcatcagtacccttatccagtaacccaggccgacaaccagtgcgtcctctgtattctcttgaattcgttattctaaggacttttcttgctctgttcttgcatcatgacacttggcacgtcgggatgagctcatttatgtctccctcttctttactcttagtgtgctagctgagctgatgcttccagacggagctcatctgcacaaggaggaccataccgtgttttacctgaatcaagtcccagccaacactgtcagagatactgctcaggaagctctcagtagtctgggtgagcagaccaacacctctgaagaatccagtgatgagtctagaagatcggtcttcgctgtcgaaggaatggagaagaaggagattctttacgtgctgaacgctgtcatgatgaaggaggacaaggcactcagaaggttagactgtgttcctccttcccttcctctccctttttcttgtacaatagactcattttgtcctctcattctccgcatccacatcaacagaggagcagaagtcaaagcgattgccatttgtacacctcatccatggattcaagcttaccaggtcagtatgtctcgttctctctcaatcacacacgtatatgttgaccatataccatctgtaatatataaacatctacttcccatccacccctcagcgcctgctaattctttcccttgaagactacttcaagtcaccctcggtcgatgttctcgagaaactgtttgacgcgctcaatgggatcgatacctgtgggatgcctacattctcgagagacgaaaaactcatcctgcgcgcgagtgaacgtagaaatttgttggtcgacaaatttagagaagcacagtgggatagtgagagaggagatctcttggataaaatagaccaagccgaggccaaagatctgtcgaccatatgtgtagcctccacctctgcctctgaagcggaacaagacaaccctaagcggaagtcgaacgcttccgctgcttctcctcctagaatcagtaccccgttatctagaggagatcgttcacctaccgcctcaagctttacatcaaatcattcgcctttaaactctgtggcttcgggatctcggttttccatctcgtccttatctagttcgaccgacttgatttttggcttgtcacttccgacagggtcttcttccaaacggacggatgtactgacgaccgattttttgaccctcggcctgccgttcacaggagctgatggcgtgagctcgcccttaccgactgctgtggacagaacaaaaaaagggactccaaaagatacaaggttttttgagacgtcggcaagactggacggaatgtttgttccgttcccgatacagatcccactcacccttttcgaagaggaagttggcgaagttggtccctgttttgtgaacttctcttatctagatcttgttcttagactaagcaacgttgtctcatctttgttaaaaacgatctcagttctctctcattgccctcatcaaaaagttttccccgccagcccaaggtaatggcaactttcccgccccattcatcccgtctcttcatacatctggcccaacaactcatccggtcatcctcctcttcaacgcgctcatcacccaacgtcgaatcatctttctggggcatggtagagaggccggcgcagtcgctacgatggttcacgctgcctgtgcgttaggcagcggtagtggcagtgttctcagagggtttgccgctaggtgtttcccgtatgcaaatttggccggattggatatgctcgaacaagtgtaagagtttttttttgtacgtgaatgttcaatgtaggccaagctaacacatattaccatcaatttcatagtcctggcttcatagcaggtgtgaccaatccccgattcgaagaccttcattccagatgggacattctctgcaacatcgatacgggtcgaatcactgtgtcaaaggacatcaaaccggacggccctttccccagtccgaatccgtcctcgttcaccactggtaacttggggcaacaggcaggaggtagctcgccgatgttcagtcctttatctgtgggatccgctgtaacagaagaagaagcaatcgaatcgagccagataagatctcagtcggaagaaccatcatcgccacagtcgatggcaacacctccgatgccaacgatggcgacgatggtaacaggtaatttcttcactgcttcagaatttggcatggtaggcacagatgcagggatgtcgaccgtgacggagaaagggaaaggaagacaaggaagaagtgattcagtcgtcagcggatcaggagcagcggggaagagcaacctgatgggggcctggggagatacggatgcgatttttatggaagaggcaagtgaatctcttctcctctcaaaccacggaaattctggtctacactatatctaactggtccactcccgcatactccagatcacttcacttatcagtaatcattacggagagtctatcatccgagctcgatttgccgaatatattcaccgattcattcgcttagcttcccgatatgaggaagagacatacgcgccttcctcaggcgcccgaatttggtacccgtccgtaccctgtgatcctctgaaaggtcggcttggttcgggggctattctctgggaaggagaatcatctgcttcacaccccgatcttgggtatcacacgggtgggcttgcctcatcaactataacggcagcaacggtgacagggaagaaaagggagagtggcggagtaggagcagcggagaggaggatggtgaagacgtttgtcggcatacatggtgtacgaaggatcgagggttggagagctactaagagttacgagctttggaagcaggttcgatcatctccctctctttgttctttccaactgtgttgatggacagcttgatcctgcaaacatactgatagaaccggtccccatctggccttctatctaggactttgatcaacatgtttcatcgagcacgcttcagtttgatctgaatcatcagctctcccgacttcggaacgcacggtccatgtctactggcgaggcggagctgattttccgatcgttaggagaaaacgtcaagacatatgaccaggtcgtcgaggtttgtctgaacatttgctttgtttcttatgatgataggctgataatgtgctttacaacgttggggcttaaggtgctggcacaaacgccgatgagcatgggaggtctggttccattcgcctccgggttgtttcacaagagcaaccatgttaaggcgtacacgctagatttctttgataccctccaacaataccctgtatgtcgcgattctcttctttgtggagttttctctacttcctcatgacatgagtatatcaacatcagagctgacctactgatacgtactttgcagattggtcgagcattcctcctgcaacttaatgctttcccaagacttgcatacgctcgtctttctagtgagaggagagaagctgttgaggcagcgctaagtcgtcaacctaagggttgagtgatggtgatgttggcgtatccactgtgtctagaatcccttgattcaagtcgtggtggtgtgcacgttcatgtttagtttccttccccctgcacactgtcttcacacatatccgttgtacattcttcttcttgcctctctccattaataacatacttgtacatatatccatccatagatattcataaagataccatggttccacaacgatgcacagactgattagataaaaattgcggcattgattgtttgctcttgtattacgtcactgatactcgtcactcatcacgctcgactttccagccctacttaaggccaccgaggagttcgtcttctgtgtgtgtccccaacatcatccattgagcttaacatcatcagatcaattctgctacaaactccctaacatcagtttatcaataacaaaacaatgtctacttcccagatcggagctcacgctgaatgtgagtttcgtcctcctctcttccatcgttcgatctatcgctcccgtcgtttttcttctccatgctcttctcctgatggaccgtgatcctgatataagaaatattctttttcatgttttattttccatttctgaatatatgaaactggtatcagacatcaagggtgcgaccgtggaagcgatcggttccttgacgggttcaaaagaatggaccgagtctggagctgataccaaagagcacgcgatcggtgtatgtcgtcccctacttccatctatgggaacactacgattctcacccatttatttgactggtcatctcacgcaataattacaggatatgcggtctgccgcttcgtcctcccctcacggagagccccactcgtccaccatcggttcgatcgaaaagaaagcaggcgagctcgttggttgtgaaggtatggttgacgaaggtcagcgagcaactgccacgaccggagacgatgctgtcgctgctcctcattcggtcgccggagagactactgtgcctggaacgagcacattgaccaacgaggcattcgatcactcaaagcaggtctagaagtaggaagcggggtgtgatgaaggacgctcacgacaatatatccaccgaaaggaatgtctttgtatgcctatgtgtatttaaaagaacaatggatcaacttttttgatactaccacggatgcaagcaacggcaaaccgatagacggttgcaagatgaagagcgagtttatgtgggtatgatgagatgaaggccgacaaacctcagacgattatccccacagccgttataaacttggcacacatacaacacactagttcttatacaatgagcgccaacggacctgacatctttatttgctcttaacattgttggtgatgggtacccgcagcttttactatcatctccatatctgttctctagtttatgatgatcttcaagacatgtgttccagaatgtcggagaagtcggacgccattcacaatatcacgccgatgaagatgagattctgggaatttgggaatctggaacctgtgcaatcagaggaatagcaacaacagcaagatacggggcatctatccaacgtcctctgatgatagaaaacagcttagagatcaaaggatgaaagagatcgtttggattgccaatacgagtctcagtgttatccaatgatttgccagtctcgtttctgagaacccctcaagtcagcaccccatattgtaagctcacaaatgagctctttctttggcgtgcgttgctcattcaaaccttcaagtgtctttgatctatttggacatgatggaacttatagtgaaccatcctgtgacttgtgagaccttgtttgcagccccttgtgtacttgtctgcgtcgttgtcatcagtcgagactgactttctcggttctctcatatgacggtatggggtcgttcgtgatttcccccaaaagatcttgatatccttctggcattctgttttatactcatcgacgtctttctgtcctacctgttcaggcttggggtaggatctagcttggtaatcgccgctggtcgttgtgtggctcagctctcgttgttgagcttgatattggatagtgtgttcgattggggaaacatatgggcggtcgcagcgatcagcctttggctgaacatcgtgggcgcatgggagactggttcgtcaaatctctctcatccccttttgatgtgttctctttgcctatctgaaactgagatagactggcgagctcactcctgtttttgagttgtgcagtatataacaaatcccaacagagagtcatctggatgttccctatcgtgctcttggcgcttatcgcaagtagtacaccgatatgcatcgccggaagtgtagccatgcagagaaatcctatctggaatccaaagcaatatggtacttccattggagtctttactaggaataaagtcacaagagataaccaagatctttgagttatattagttcccgtgttgggattaatcttgggatctatcatcgcaactgttagtttgagtgtgtcgtttgtcttggttcgtccacttccttcagaattgtgtatctttctttctcctttccttctttctggagctttagtgattccatcggaactgaacaacgagaaaaaataatgcagaaagagtttaccctctatcgagatcggatacagaccaagctcgcaatgggagcttcccgatttgagatttctcttcctgttgctaggtcggctttgaaacttgctctctttccgactatcaacgatatgaggtcggtcagatggtttcgtcttgccttccttcgcgtgcattgattgccattgtttgagacgttctgagagttgactttttctttgcgcgcacatatgcacacgtctcatttttttctcaagtatgattggtttggtagccatcccaggaacgatgacgggttctctactaggaggtataccgatagatcaagctgccaaactccagagtatgtgtccagaccgtgcatattcgaactagatctgggttgttgaaatcgtttctcttttgccctttgtgttcatctagtgattctgatgttcagttcagttccatttcaccgcctttcgcccacatgtctttccttgaagttgcaactgattcatcgtattactttctcgattccatccctcccccccatgttatccgtcctcagtgatcgcaggcgcatgtggcttgtctgcgtttcttgtagtcatcctgacatgtatggtcctgatcgactctgatcatcgggtccgaccggaaaggacattctaccaagcgagcatcatcagtggaagtcttggattgattccttcatggatgtcgagtatgaggcagaagatatgggtgaggggggaatgatgtacaagaagggcctgacatcgttctgtctaaagtccttcgcttgccgacgtgtcgttttcgttttcttcttccttgatcggcaccgctttaaccatcgatcccccgaagacctctcccccacatctcaaacaatcccagcctttctcttgccgaactttcaactcactgctcccttctcctgaaaccatcgccatactgagttcggatcgggaagattctagaagcgcccctccgagacacgcataacagtatatacagccggcccagcaatctgcgcgaactggtatatggactgctaccgactcatcctcttcctcctcttcctcctcttctttcggtttctcttcctctaaagttgagccgaaagacggattcgatgagtccgctgattgtgccaacggagaaagctgaggaattaatggcatagaagggatcggaccaggcgcacatggcccattcccaccggtcttgtccgaacgggagtaacacagcggacaggcccgcctatcgatcttgctgtatatcccttcgtgtggtcgatgactcgagctggactgaaagagagaagaatccgagttgggtggtgctgtttgtgagttcatatccgagcgtggtttcagggagagagatgagggatatatcggaaggggatcggtcaatgtagatagtgtagaagtgaggccatgttgtatccgagaaagagggccaaggacatatggagccaacggaaggatatgaggcatgaattgctgtcatcaaaaggagttcatcgtcagtgaagagcccaagaaacagatatgcaagccatgcgagtgaattcgaagagcataccgataacgatccccagacgagttgacggttcatgaattcatacgacaccattcgtgtcagcttggacgaagaagggacaagcctgagccccagcagtctggtcaaaagtgatgggtagcttttcacaggacgagaggaaatcggacatacatcagcaaacgcatctgaccgagagagacaactgaagagacttaccgtccatcgtagaggaaccacagcagccccgccaattcgcctgcccggccgaggtcttcaagtttgttcacaccatcccagatccgtttccgcaagctccgacgaggaagatcaggccatgatctggagagagcatactgcttgaatcgctgaaggatgtaccgggggaacatttgtggagacagaaataagtgtagaagtagtagagttcgtactagaataatcaattcgatatctaccgtcagtattggacgaaactctcctagaaaagaggatacagaggaagagtacgaacgacgatgcttggatgacccgccgttccatcgttcaggcttgtacttgaggttttccagctgagacccaggagtgacaaggcgatcccacatacagtacttgtaagtgatcaaactgatgagcagatacaactctggctggaacgtgagcttgtaagaagactgtccatgtgcaccaatatgatgcattcagtctgtcgttacgtgagagaagcgatccatgttttgagagtatacgaaagaacgaacgccaaagttatctagagaagaagcgagacctcctccaagcatattgaccaaagcgtcatccaactcagcggcatccagctggcctaccctgagaacgtttggaaggaccgaacgatctgccatgggacgatgggagtgtgtgcgtatgtgtgtgtgtgtgatgagcagctgatggctggatggacggacgaaggaagaaggtgatgggcaagtaagatacaacttcggttaaaccggataaaatcgttccggccagaactttcatcctttcatcgtccatcccatctgatggtttcggggttggttcgtgcttctttgttcttgcttgcttccgcttagagtgtttggttgttgctgctgttcacatgtcacctcacgtcaccgctcacaggttggattagtgtcaagttctcatatcagatccaccggtcgctgcactaggggctctgcatctagcaaccaaccgtccaagacgtgcattcaacccaactagatcaaccttccttactcctctcgatgctctttgttcttcgcctagtccacccatcagactctccaacccgtccatctcaccactctctccttggacttcccattccttctctcctccgtgcgctttggcatgctcttccgcctgagggtctaccggaacgacttcagacatacggacgttcgacagatcacgaagcaagtcccggacatcctcaacgatggacgcacgatcggagggtgacatgacagagatcatccttggttcgcacgtttggagatgagaagacgagggaggacaaagcgaagcgagaagagaggatgcatacccccgaatgaagcctagcgtccgagaagaaggcatagattgggcgaggccttgatcgaatccggtctggatggtagagagcttgccgctcgagataccttccttgtaccctacctagatatgacccacgccaggtatcaagcacacagtcggatataaacacatgtaagcgtaaggagagggtccacactgtcgatgatgaatgagaatgagagtgctggcatccatacattagtgaatctctcatgtagggtagaccattcctggttcgaactagccgtgttgagggcgctcgatatggctggcacctcggacagccagtcttcgtcttcgtcatcaatgtggttgttgctactcgtactatacatgttgaatcaagaataccctggcgaatagatcaacgctgaagaacgagtgatgatggtgacgatgatgatgacgacggtgcattgcaaaacacaaccaaagaaacttcaaagccatgtctttctgttctcctccttccatcaccaccatcatcattgtgtctgatacctcgcagcgtcctaacgtgggaagagactctgtcttcttctctactccctttctctaaccatcatgtcggttgacacgccgatgcttccgagaaagaaacagattcgtctgccgtttcaaccatcataccttccgaaacacgccaacaagtctcaacctagatgcgccatgtgagtgtctcttcctcctttctcgcacctgtggagccttcaatcaaaacaaactattctcatgaagctagttctcgactgatgtgctattcctgtttttaccgaaaaccaacgatgtcagatgtacaaaacaacaatcaaaatacttttgcccccgttgcaacatcccgtactgttctctcccatgctaccaaaacacatcgaaacactcccaatgctcggaacccttctacagacaagagattgaactcgagatgaaggccgaacgaggagaaaaggggagcaaagaagtccaagaggcaaaaggaaagatgtgggaaatgttgaaaaagtttgaggaaggtataggtggtgatacgctggaaggcctcgacggattcgaccaagaaagcgaaggagaggttgatgatgaagaggacgatggactagatgagctacaggccttattggaaggatctaaactaggtgggaacggttttgtttgttcctcccttcagggtcgtgtacacgagtttctgatacacaaagctgatgtcttttggatcatttgtctctctccactcatgtatgtccatagacaacttatccccggaggagctactttccttgcttcccccttcacttcgatcggaattcatctcatccatcagtaccaactcgaaccagccatcggcagtgattcagacattgttagaatcagaagagctctcggctgacgcggaggcgccctggtggatgcctgtcgaaggagaacgagtcggaaaagtcgagggggaccatgaagaagaacaaggtttcttggaaggggcaacggccagggataagaagaaagaaacacatgcggtgccggatatgctcaacggaccaattgtcaaaccgacagaagcagcagctgaaaacctgatgtataacattctggctatcaccatagcgtacatccagatatccctcgtctatcggatttctccttggaccctgctatcgacatcgctgaagtcaaatcaactagataggaaggagacgtctcaacaagcctgtgaggacttgatgaaactcgttccgttcttggaagaagcaggctcaacattactcttgaagtcggttgaggatgccgaggtatttgtccgatctttggccgatagcaatgtacgtattgcatctactcccttctctgtttctaccacctgctgcttaagcgctaaacatcaattgcatttccctcctcatggtatttgggattgaactatatatctagacaacgattccctcatcaattgccaaagctcatcttctcccgctcctcgttccgccacccacgattgccgttctatccgacatcaacacgacagttgatccgtccattcctctagtccaacccatacatcctcttcaacggcttcttgcggatgttcaccgaactctttctcaaagtctatcctcaccctcggtacaccgttcaacagtcgatcgaacctacaaagcaagttcactcaagtcgacatcttccactcgaaaacgagctatcaaaaaattagaattcttagtagcttgtgtaggtgtcatcccacgaacgacatgggtccggttggggaatgaggctggttcgttctacagtacaaaagaacgtgaggaggctgaggagggagaagaggtcgataaggaaacgaacatctggctgatcgcacaagaagaccaggtccgagacaaacagaaagaggaacggctgcgagagagaggaatgatcgagtcgattgataaggatggagaagcttgcatcgagacactagatgatgagcaagatgaaatcgcggacattgcgataaacgaaagacgagggggaaggattccttctgggagggttatagaaattggatgaccgtttttttttgtcttgcttcttctggtatccgctacatatacaactatcgaccagcaagcccattcgagaagttgatgattcaacagaggaaggctttgtttggtttgatttaaatctcatgttcatatgatcgttgattcgaaccacccatctacactcacatcaactcgttcaacctcctccctcaaagattcctcggcactcgaccccaaagcttctttggcttttctcaatctcaaacaagccaaatatacagactcagacagcgggtccaacaataatacttgcttctcgccctctctcgaacaaggagattgatcagaacaccgcttagtatccaatgccgattgaatcctggaaaccgcggattcgagccgatcgagtttgttccgatagctggacaagggctcggcagtagaggagaggtaggcagaggcaacagtgatatctagttcggcttctctaaatcggttcggaggttccgtcgcaaaaagaacgaaaggcgcttggaaggcttcgactaatgaatctgtttgaccagccaaacgtatttcttcagtcgggcagaccaaggtagaaaagagaggaaaggagaaaatataaagactagaacagggaacgtaaagacatactgatagatcgttcatctaggactgtatcccacaacgtctctctccagccaaccatctctgccgctcgttgtttagagaattcccaccacttgatccaggccgtctcttgcgccaaagatacatcacttgacggaagaacgatccgaccaacgagatcactcgctaaagaacggatttcttggtcatcatcttgtaagaatcctcggatgagccgactcagagccagaaagacttttgaggaaacaatacaggatgttggattgaacaggacgtcactagcagagacaagtgacaagattgtagagagtcgagtctcttccgactacgaatgtgtgtttcagagaagtaacaattcagtcaatgtttcggatacattggcaagagggatcagataagggatcactaacttcgttctcgtctgcagagctttcaagcaaggcaatatactgtgccgcttcatccagagtgacatcctgtttgttggcgaggatgaaacaaccaaagatgagatcaactctctatgaagcttgggggaggccgatagctgaactttgaaacaacatacgatttgaatgttcgcgccaagatgtcgcaaagcaacttgcctatcaggtaggttcgataaaccttcaaacgcagccagacgttgagtgaacgacatccttcgatcatccgtcctgttgtctccctttccagagtgttcatcggtcgactccggagaagtctcagactttcgaacatccttccatcgagcacaagccgctcgatacagatcatacccagggaaatttttcttcgcctcctgatcgtgttctcgatccaaggtagcgaagttgaaaatttcttggaagtatcctattggaacatctgaagacttggtctctagcgcctgaacgaccttgatatacattgcccttgtaggtccacacgggttcatgctcagcagattctctcttccatcaagcacagaatggaagacctggggtgttgtcaagaaagagatcaaacatccagtattttctagtagggcaaggacctggaggaggagaccgtgtgtttggttctgacttctgatacgttctttccctaatccaagagatatgatataatcagcaacagctgaccggtgtatcaatgctggaagtgcttgggatgccgccaaccggatctgaatagtccaacaaacacaacaaagattcttgagtaaagagccaagaacataacaaatgtgtgcgaaaagagatatgatcgacggtgaaaactcacgtcgagctctttgcttttagagagcgcctgaattagaggaacaaacgctagctgatctttcgttgcaggttctgatgcctgcaagttctgaaacacttggaggacagcaaacactgaacctgaactgacgatctgatgaaaggaagaaaaaagaaagaagcatgcgggataccaaatggggttaagcggacagaaataaaaggaccataggccgacaatgaagatcaaggacggcagtacctgttcgttcgactgtgtagcttccaccaagactctattgaacagaggtaacaacttgggatacgaggcgaaccagaccgtgaagtactctcgatgttcgatggtcatttcggcttgacttcgacggtcaaaccctcttttaacgagacttccgagcagttgtaagccaacgtttcgaactgttgacgtatcgacaaaacaaacaagagcgggttagaaagcttctcgagttttttttgtttgaggcaagataataccaggagcgaaacgaacctccccaggttggtgaagccaatgagtccatagcggtcatcaccgcacgctcgtaataagccggaaggtgagaagcaagcttcgcatttaaacacacaacctatcctcaagaaacccgaacccgaataaagaggaaattcccacgattttggtcagcttgagcacgagaaatatgttcggtattccattgtccattcgatcgatcatgacttacctgaagagtgttgatagcggcgataacagtcgtaggctgttggtccgatttccccagttcaaagagcgcctcgaaagcgatcgagacggtgtttggtgcacccaacatgacggccaagagaccgtaaggaagtccggctgatcgacgaccagccgttctgtgatctgctttcaacgcgtctaggtgatcctacataaagtcgagtacaaagacggtaagctccggtggatactatccgccgttgtttacatgtctcaagaagaatacaacgacagaaagggaaaggcaaaaaggaggcgacctacatagacccaaccaagaggcaactttgagaacccgttcttgacgaccacgccgacaagttcggagtaggcaggaaatatcgaaagaaatgcgcctggatgtctgatttcgctgaggagatctctatagagcgcggcagcttgaacgatgtaacattcttcccagattggtgagattttgccagaagtatgtgaccgaccggctcgaataaagaggatggagagcagagtacttttggtgggaaacgcgaaaaccttgagctgctacggaacatctatgagtcaaaaagagggctgtacatacctgctctccttcaccgccctccaagcccaactcaagatcgcactcttgatctctccttttccgcctgctgtgtttgttttctctagaccatcagtagcagcagcggaagcagcgacgacgacagccctagcctcctcatgatctgccactccatcttcgacttctactgattcggacgaaagaacccgacgggtggtttgccatacacgttctagaagacgaagcgtccggagaaagatgggttgccaagttgacgattcgacttggtcgattcgaggaaagatctctcttcgtatcaaagaatggaaagtgaacgatacgtgtttccatcaccaatcagtgaagcacgataaagatacaactcagagaaaacagacaaggtaactcactgaagagcttggagtaaaccgtggactgggaacttttgagcggcttgtacgatatcctttacagagatatctactctttgttctaggttgtccaagatcttttcaacaaaagatactgtacaatcccatgattgacaatcgatgagttttcttttgttctcgccatttttcttcttgctccgcgctttgggagagctcaccttcttctttctggccaccaagattagctttgatatgaaagactaatctgataccaagagcgcccgtgtgcgaatctgaccctcttgggttgaacaggtaggtctgttttgcttctcgctcgagttggtctatcagttcgggtgtgtccagtcctgggggtggagactctgtagagccgagtctgggttggcacggataatggatttgagaaatgccgaacaaagcacctgaaggaaggaaaaaggaggaagaactgacagatcgcaggcggcctctctgatctcagcatacgtactcccaaaacatctcaagattctcctcgtgactctcgcaccaccatcaaacaagccgactgctagaggatgatcgttcgtggcttgactctgctttgaggaaacgtttgagtattctacaaagaacccggcggaccgtataagatgaagtatcttgagagagaggattgttcgcgggtaagttgatcctggtcgaagatttgtgattgtcgtataaaccatccacttttttgtttttgggcaggagatcaatatatagatacgaaaaggtcagcggttttatacaggcgcgatggatgcgagtcataaaaaggagggaacacacatcaatcaattcccgactggtttttaaatccttttcaagttgtttaaccttctcctcatcatccagctctggctttatactctcctttagttctgtggacttggctgcacgcgctcgcttggctaagagtttagaaagatctctgtgagtagccgaagtagacgattttatccgtttgagaaggtccgccgtggattttaaggtttgttgtctcgttctggtcgaaatgagcgtgtgagataggagacaagagatatgcgtttggtcaggagcaaagcaagatataagaagagggcagaagtgagtaaaccttggggatcgaaacaaaaaagaaagaaaacaggagaaaaggtcgaaggaaacaaaagagtcaaaacgaggaagaattcaagagagcacctacctgctatcccacaagttcatggctcccttgaagaagagtctgacaacattggcctcggcctccgtcaatggagtgttgaccgcaggtctctccgtgactagtccaagtacggctagcctgacggtatcattcgagctctgaagacaagtctgaataaggtcatggctgacggccatcttcccttcttgagctggttgaccgataggtgagcagagtgagaagccggctccgagagtggcaagtgagagatagacctcgtctttgagcggatgggttggatgagtgtcgagaaggatctgcgcgatagagagaagggcatacgggtttgactgagtcaacggacggagggtgtgctggaggatgttgaaccggatggtctctgtgtcttgggtttccgttggtggagagagaaggatttgaagaacttgaccaaccaagatctcccaggtccagttcgaggtcgaggtggaatcggatgggtagtagaggaagatgatgaaaagaagaacggcaaagagatgacctctatagcttgcaaggtctcgctcgggcaatagatcgagcagttcagtcggaaggtctggagcggaggctgaaagttgcagggagcaagaatgaaggaggagtgcaagaatctgaagaggagcctttgcgatcaacgcttggtttgaagaaagacatttttcgagtaacggttgaaggagagaatttttgctgatggtatcgaccgaggggagggaggaaagaaaggatgcgagggactcgtaattttgaatagctccccaggcagctatactttttgccttctcctcgctcgctgccgagctcgatactgccagcgctttccatactttgtcgccgatagctagctgtcggctaggctcgaataaggacagagcgatcggtatcggatctactgatgcgttcggaggtgctcgtaggaacacggcgagccgcttgaagattgaactgagtaggccgtattggtcctgagtgagcggttggccgtcgttcgcggaagatgggtcgagagcgaggttgaggtacgtctcgagggtagctctaaaggaaggagagcaggatgcaataggttccccaatgcaagtaggggtgtaagagtgggtgagcttcaggtagaataacctgtgaaagagctagaaagactgggctgaccggtcgaggatgtcttgaccgtcttttaggatggacagccggagctgtcggacggtcgagctctgttcctgtgagcgcataagatctttgagactctttctgctgaaaagaaaaacaggacaagtgtgaaccagatcagtagtgagtataataaagctgctgacgatggcacatgtagctgaacaaaccgacttggaaggtgagtgagcggaggaaggttgaaaggaggaacgatgtccaaagacgctcaacatctggagttgactagtgtagacttcggggtcctggttaggatatgtgttctttccttctttctcgcaccctccgtcaggtattctcatgtcttttacatagctagcagaggatagagaacgaggtggtcgttgtcagagtatattttggtgttcctctgtctcattatcgagtgctctgtgggatctctcagctgacggggaaacacatcatgccttgtctctcagtgttggttgcactaggtattgagcacggagctgcttatttgttcatgtccagtgtgatgccacagtaactttcttataccgaacgaagctccgtctgtcgttcgtacgtacatccaaccatccacccatccactctcagctctgtctatggggatggtgagcaagcatgggtgatgaaaagacaggatggtgacagctcgagagcgcatatagtcgacattgtaataggacaccgtgaattttccaatacatattttgtaatctttcccaacagtccggcgccggtcactccattagagaattcttactcacttcattagacaatccgcccgatttttcctatcagcctttctcgccttctccctcccacccttcatcatcgggtcgaagttgatagacaagcatcaacacatccagctctccctctctcacactcttccataccctcattcaatcgtcacccagctactcatatggccgacctggttgcagacactttggcccttagtctggattcgccgacagacaagaaagctggcagctcgccccttccacctagttcgaaccgttcgtcctttttcttgccagtgtttctttcttttcttctctctttttttttcctctttctttctctctcgatgccttggatctctctctctttgtcctctctccttttcattctccaagtttgtcccaatgtatgttccgagaagagaataggaaggtacagaaagagaacaggagagggagagaacggtcaacgtccgacggcatcgaagatcgatcaatctctgcccgctctcaagctgcccctctcatcgatgccacacgtctagtcctgaggtctctccgctcgacctgttccttctctctcgctcccagtatcgcttcatcagccattccaggtccagaactcaaccaggaatccttcgtccgcctcttcgtctctcctgtctgcatctcgtacatggagagacagagacagacagacacacccacacatatacgccacgatctgaccatcacatccttttccttcgtatttgatcttgtgtcttgaatttgttctcactctctcctctttgtttttcccttctcattcggttcctgccacttctttcttcgtcctcgctcttcctatctcgtaccctccactgttcgccttggttccctctagactccacgccgccgtctttcagtgcggcctcatccgcaccaaacgttcccactcttgaatcaacctcaccccgtccgcccgctccgtccggctcgttggcaggagcgacctccggtccccgtccacccccaccatccatgtccgctcggagactaggcatgaacccgaacggactaccagctagaggacccgtcctcggagcgaacggtcctcgtccaggtggtggaccagccctgatgccaccaggcctggccgccaagcttgccgctcagtccgcacaaaggcaagccaccggaggtccgtcccttaaaggaccgatcaattcgtccagtccggtacctccgtcattgatgaacaggccagggatgggccaggcgactgctagcgcccccggtggtttggcaagcaggcgagctgccgcggctgccgctgccgccgggggtggcccagcaggcggaatgggaagacctccgcctggaggaggtattggagcgaggaggttccccccaggaagaatccctggtgctggcggctctggtggtatgcccggtggcatgacgttgaacggcatgggtctcggtccaagaaaggacgcgttctcaaactttggaaagatcgtgtatgtcttcatctttttctcttgcaatttttcgcttaaccttagcatccttgccgacctcgaccccgacttcttcccttttttttttggtggtcatcctccagtgatccatcaggtcgattaaatttcgcatccaaagcggtcctctcggcggacggtgtcgacttttcatccggtcagtcttacaagatcaacatgtctgagctcacccttcaggacgagcttggcaagggtcagtacggtaccgtccagaaagtgttccataaacctacaaaggtcgtcatggccatgaaggtcggtcgttcttttctttacgatcactgtgttcgttctcgcacaaccatcttacttttccttccgcggttttgttctccttctttcttcataggaaatccatctggagcttgatgattccaagcttaaagggattctcatggaacttgacatccttcaccgagcggttgcgcccgagatcgtcgagttctatggtgcgttttttatcgaatcttgcgtatactactgtatggagtacatggacgccggttcgctcgacagagtttatgaagacggtgtcagtgaggaggatgtcttggccaggatcaccagtggggtcgtcaaaggtcttggtttcttgaaggacactttgcagatcatgcatcgaggttagtctcttctcgatcatatattcttcttctcaaaatcattgtggagagtcgctgattaccagctcttcgtaactgctctactcgcttccgattcagatgtcaaaccaacaaatatccttgtaaacaggaaaggacagatcaagttgtgtgatttcggagtgtccggccagctagaaaagtcactggcaaagacaaacatcggttgcgaaacctacatggctgtttgtccccccatctgcctctacacttctttttctctcgccttcgtacttatgctttcatcctctccatctcgaaatctttcagcctgaacgaatctctggcgagtacgcaaacagcttaggcacatactctgttgcctctgacgtttggtctcttggtctgtccatcattgagaccgccatcgggaggtacccgtatccgcccgaagtgttctccagtccgctcgcacaattacaggccatcgttcatggagaaccgccgacattgccagagacgttcagtaccgaagctagagacttcatcgcttgctggtttgtaccattcgtctatacttcaaccccttctcgatcaggttttgagggttcgttgtgactaatgttttattcatctctttctttagtcttcgaaaagaaccgacagcgagacctacgtacgccgagctgctcagacgtccattcctactggccgacgtcggtcgagaagtagacatggtcggttgggtcgctcgaaatttggaaaaacgggtggcaagaggtgcgccaatcatgcctccggccgattccggaccaaaggaaggttctgcaccggtggtcagtgctcctggaggaggacccaaatgagaaaacatcagcacagatgccccaattccattccctttttttcaactctatattcatcctttttcatcttcttgtctatcacccttccttcatcatcaatccgttcgatcgtgcggtaacattctggaacatctttcttcccaagtgcctctctgcccttttctcttggatactcgatttctttctcttacatacatgcgatcatcgtgtctttcttcctctcgatccttcctctcctcttctcccctctccttacaagcttctgatccttactcggttgcctctagtctttcctctcagaaacctcactccttgtcttcgctatattacaccaaatttctatttttcttccatctatctctttttctttcttatacatacatcgcctgttctgccctatccctttctttcatcggtccgttcgtccgctcttgttagagtcttcttctcctttcttctattcgctctcttctcctttgttcatctgttcgtctgtttcctcgttgagttgttctttatcgttattgatgtatccttgattactttctctgtctcttttatctccttacccagaaaaagaaaaacaccctctcttgtgttttttttcttcctattcgaagacagagttggatcaacagagagaaggagaggcgaatcgatcgatagggatttcgttctacatctctttttcttttcttttaaacttcgatctttgtctcgttcctgataccttctgacggtctatcgtcctagtcgtgcgtcgcacatcgcgctctccatccggcaccatctatcttccccaaaaaacgtatgaacacaaaaagaacaacgacaaaaatagaaataaaaacaaagaaagacgaacaagaaaaggaagcagaaaaaaaaaaagaagaggaagagggatcaagaacgtaaagcacaaacggtgtcatactctactctaccgagtctccatgggatcccgctttgtgcgtagaactctcgggggtcttcatcctacgtttcatcccgggttgcaagatggggttcaaagaaagcaaaccggtttcgaggacagaaagagtcaaatcgggaacagttgggtttgactgtcaacatggggtggggaagacaggaaggaaacagaaagagcgacgtacggggcctagattcaacacagtcgaaatctgttgcaacctgatgaatttctctctcgagcctccaaaagatgtctgggtggtaaggaagtttgcgatcgatcgtagatctctatcaaaccgtagtgcgccgagctagacccgtggaataaagcacacaagacaacccacccggagagaagaaagatacacggattgtcaggatgacggaaacatgattttgaaagtagacaaaagggggggagaggggacagacctcggtgaatttcatagtcattaacaatttctcccatggtcggaccagtacttcgacgctcattaggaagaacgcttggtagtttgcgtccgtaaatgagtcctaccatattttcattccagcccatgttgaggtcaaaagaagaaaccccttgtcagattcatatgcacgttcagaaatgaagacagatgaaagtctcaccctgtaaccctcgaccaacgcgtcccatcctctagcaaatctttttctgacgacgtcttggaactctgcttctgcgtagctatcttcgtccaatgtataggtaactcctttgtagcaatcttcaataaatgctcgcagtctcggtcgaacgagttggttgaatagttgatcgaggcttgcctgtttgtgggcgtgggttatcaagaaggaagtgagcttgatgttcgatggactaaacttgatctccacattttatctgtcgacgacagctcacaaaaagacgcaccttgagagtcacccggaacttgtcagccaatgcattcaaaggcgcgaaggctgcgatggccttctcgacctcttccgtcaagaacgcctgggggattgcgtcactctccagaatctcatgtagaagtcgttctgtgtgatcagccgaaacgtccaaatcatttgcgtatacctggtacgttcaataaagaacagatcgtcgatctatcatcagaaccctctacgagcataaagaatgagagagataaggacgaaccacaaacgttcctctcatctctctctctaatctctctgcctcacttcccgccttcggtccacctcctccggtggtaccaccctgagtggctccggtcacacctgcacttctcacacctgcgtacacaccgtccatcttcctcttcacacccccaaggtaatcaatttcgatcacttctgccactctggccgtcattctctccaacgtactcagactcgatccggcaattaatcggtacaacactgatttgagcaaatagaacgtatcgtccggtgcggatgaaaggtgtggtctagaagatgtgtctgagatggacaaccggagagctttatcggtcgtatgtcggaggaagaacgtctcaaggggctcatacacattttgaaggctttgatggaatagttgttgagagccactggtctcgatcaggttggttccgtcaggagacgactgggaaggtgggagtgatggcgggaaaagtggagagtttggattcgcagaaggcggaggtactgaacccggatcgacgtcctacgtagacaagattttagatgaatcacattcaagcccagacaagcacacagtccatcagctcaacagaattctatcggtgccctgaaaaacaaaacggacctgtaatcggccccataagaaacgtcgatagagtccccaccggctggtcatgcctgttagctctctcaacaacttgtcgatttccctcggatctggtcctgtgtcttcgtcagccggatgaggagtaggcgtcgagctcgagggagtgacttttctattggcgttatatgtgttcagcagcgaggtggcagcgttaggaagagaggataggtgagaacttgacaggacactttgaggcggaggtggcgaaaagggtgatctagcggctgtggttgcgttcttagtggccgacaactatgtaccgagcaacaaatgtgatcaatcaaacgaagaagaacagaagatgcgttatgagatgatggagggaacagaccaatctgcgaaccctcctttcctcctcccaaccttctagcaaacctttgactactcggtcaacctcttcctgtaatcgaccaacaacagccttcatccttcctgatccgtaatatttctccactactggttgatgctggtctactatcaagccaatagactcgaatagagccgtaagatgagctatatagtataacggagaggaagcttggaagtttcaggtgatgtcatcagacgtatgagatgaacatatatttagtattgggtcatctcacttgacaagcggaatgacgggatatctcactctttccagcgctcatgtttcggcctcgaaccagacctacgacaaagtcaccatatgattccagtccctcgttctgtgagtcggttcaccgtgtcaagagcgagttatacacgagttgagccagaagacgaatgtgttcatcaaacccgttttacacagacagctgagtagtctcgccatagtttgacttacttcagctccgatctctggccataagcgaaagaatcggctagttgcaacctcatctcgagaagctgctgctattccgaattgacgagaaaagatgtgaagaagctgggatcgaaggtcatgtaaagactgggagggaagagatggatactcggatgtaggctgagaataattttggcgatgatcgatatgcgcaacttgatttatatcagaatctggaattgtaatcgaagtggaagaggggatagaacttacaacgacccgagctgcaaagccgccttccatgatctcctgaggaacgtccatggctcgtcggcaggatctggctgctgtttcccagtcttgggatgcgatggaagtccttaagatctctaaagaggtctatatacacacatatagttcgaatgagagtgccaagttggagaatgaaacgagtaaactgataagtctgcacagtcacttggatgtgttgccttcgctcgtgtgcagtctttgacgagacatatgagtagagaagaacggtgacgaaccttgagctccatcacttcattcagtctatcgactgcttcccgaactctcttcagctccagatccagccctctgacctttccgccgaccctctctgcgatttcattaaccaccccgatcctctttagcaggccttccttcttctctgcgctccgtccgagttgtccacctcggctggtcccatcgccatgctcgtcacttcccacctcagcctcgacctgctcaatccgaggaagcagttttttgatatttgtatgggccgagtcgatggtagttcgatctgataaaagagcatggagatcctgagagagtgtagactcgagcgtctgaagcgttgccaagtgagggagaagagctgaggagagtaatgtcctaggatgaacacgagaaggacccggtggcggatcgaccgaaggcgtagctgcctgaatgtccattccgagacgcaagctagttctactgatgagtacgacgagtcactgtttgaggtacagttgaaagatgggagatgaaatccaaagagccccggagaattgagagtagcgttggcagtgagcccgtgcgaggctggttagggttaaatcccacgtgttttgtgccctcgcgacgcgtcaaagaaacgcgtcagatcgacgcgtcggtccagctaattacacaaccttctcggtcactctggccgtcttcgtcctcgccctcgttctcgacatcatctctgtgtcgtttggtctccttggtctcttttctgtttctaatttccaacagcgataagtcccttcggaaatttaggggataatcaagaagtttgatccaagttttcctcagatcggccgatttttacccatgccacgctccactgtcggcacgaccaagaaacgtcggactttgtcacacggcaaaggagcgacatctacatcctaccaacaaacctcagaagagggagagggtgaagacagctcagatgagatgctggacctcatagatatgagtaccgaggacggacaggactcatcgacagtagatgacgaagcatccgaagccacaccacagccgccttcatcgccgcatcttccgactccgatacctgttcctgtccttgaatctcgtcgtgctcaatcaatcaaacgggcagccgctttgaggatcagaacatcagatcaaactcctcttagctcatctccgatcgtgtcccgagagttgaatcctcattcctcctccctcaggcgtacatcatcctccatgtcatcgcccaggccgcacccacctcttccaatccctctggtctcctacctttgcagtcaactgctttcaccatctaaatcttctcacccaggaagatcgaccacgcctctaccgaacttgtacatggctctgtcactgcttcgaagctctctaagtgctccaggagcgagctctggcccgagagaagaaatcgaaatgaggctgctggagggatctgtcggagtagaaatcgtcaagctgtcattggggatgggagttagaaaacatttagatactcaggataacgtctggagagaacgaggtaggattgaggctaaagaggtggagcggggactgggcaaagcggtgagttcgatcaatggaatacatatccgtccgcttgactgcctctcattcttcttcctatcgttgtatgcacataagatatcactctgtcaaagggtgagtatatatgcccatttatctattgaaatcttctgattaaacctcaatcaattgccctttttttttaaacctttccagcatccctctctagcctcgcaacatctttggcgcttggtcatcctccagactgatgtcaatgccttacttgtaagtcgtctctgcttctcttggtctgacagtgttcagtggctgatcgatggctgcatgtattttaattataggggaaccacaggattgctatcaaagccctcaaaaaagcactggattcgccaacgttcgtatattcttctctttttctctgagacaagtgtaggcaaactacgtttgcgtatctctcgtattgatcgaagcattcattggtgtctttatgtactcagcctctcactagctgcccgcttccaacttctcctctctcttacaaaccactacatcaccgcttcgcctccttctttgtctctcgctttgtctacactctctactctccactctcttgccacaacgaacgacgagcctatattagctctcctttcctcaatcgcaaaattaggtatcctggctcgagaaggaagctggcgagaagctcgaagagtgattgattccgttcgggcccacccagaagttcagcctttcttgtcagattcgaccgatccttccaaaactccagctgatacagcccgacctatagagggcgtgaaggcaaaggcattggagaagcagttgctcatacatttcttgggcttcgccgcgctcgtctacaatcatcttggtgaagctcaagaggctaatgcgatgatcaaggttcttcatgtcaccttggatgaaggcaatgagggcaccgagggactaggagggggagtttgggaggttagttcgaacttactgttttggacactcatatgtgctgtgaatacgattagaggtttgctgagcgtccatcttgtttgatgctccttcagatacccttgcaacctactgctttcggaccatatagcgatggatcgatcagcgtcccacttcaagtcctgttgacacctccgcatattctatacgtccttgcatgtctgataacatcgctttccaagagagaccctgctgtcaaacggcctaagaaacgagtgtttgcagaggaggggatcaggcaactcgaccaaggaatagaggcggcaccgggaatatcttatccaccgtttgctacggtattgcacgtaaaggaatgggaggtcaaacaagctacgatgcatgctgagcttcagtgtgagataattagtgttgccatcatccgttcagaatttgaagaagcccaggaggtacataatcttctcttttatcggtctttccgacccctttgcttaaccacgctaatcttatatatctcatcacacccgaagagcatcgatagtctaatagcctaccttcggaggaagtctcttttcccctccttcagcgcacaagtaactcttcttcaagcccatttatctcattcgacacttcaaaccgaccgcgctttaatactctaccgagtcgctcatcacaccgcgctacagatgtgcacgacgtcggcgtcggctcgagatctggctttagcggccaagttgggcgagatgggtctaatggtcgggctcggtagattggatgaggtcagaacagaatgtgaaaagattgcgaagaagtcttggggaaatggattaggagagacaggagcatacgtcgtcccagctggctcagctacggtaggtcaaggaggtgaaccaaggtctgaagcttcgagtaaaggagggaagatgagagacgttacaggggctgagaatgtggtgttgaaggtttcaggaggaatgttgttggctttgatggagaaggagattctcaaatcaaagtacgtgttcctcttctctttcacgatattgaacttgaaggcgcatgtctctcagctgatctagtcgattatccttttctttccttcttcaagacaacatctgagatcctgtcttgagctagctacaaccgctatagacaacactgcccggcccattattctttctctaacggctgctctctacttggtacgtctgattaataactccttcgttcatcagtgccaacatctcgttctgtcgaggaatactgtccttagctttgttcatatgttgaattttttaatacctcctttatcacgaaactagaacactcgagctcagcaatcgctagtgatgcttcagacggcccttcatctatcgcgcctactaggaaaggacggttctcacggtcatgcagctctaggtctctggttgggagagaagtatgagagtgagtacctacactgtttctctttgttctcattagggttgtgtgtgacgcacagaaattcctgacctagtggtcattggtcgtcttggtacgggtataggtgtgctgaagaggaacaaggatccaaatgcggctggagtagcgaaactgtaagtctcgggtttcaaatacgaccagacgatctgtgctcaacctcggtcttgtttggttgctacagaaaccaacgacatcgagaaaaactcgccgagctttctgcgtccctcccccatcctagcccaatacagccgaaaaccgagcatcagatgatggagtgaatcatgaatccatctgtcttttgcctgattctctattattcatgctttacaatgtttgatttcacctgatattttgatctatacacaccaatcgaaagaccgattggacgtttcttctcttctttttttttttgcaagtgacacgcaggaggaaagcatttcatatctcaactttatccttatcccacgctctggcctctccgcgctttgtgtactgcatctccattacccctttctccctattctccatgtccttcaaccactcgggtttcgaagcttctttcttctcttttcgtcgtttccttcttcgcctctcggtagatgtgtctgaatcggatgaagaagatgagccgagaacattctttcgagattttcgagccgcttttcgatcggccttctcttgtctcttcttctcctatgtttgtaaaacgaaagacaaagacgtagaccatgaatcagaaatcatcattctccccttctggatagatggaaaaagctaaggcggaaagaagacagcagacttaccttcttggcccgccgtttagcctcctccttttccttcagtagatccaacattcgttcccaaccttcgcctactaaaccctgtttgggcacaggcgcaacgtccaacctagggtcgtagtcttcttcgaaatatttgtccatcttggacggtttcgtgctttccggtaaggacgatggtggcggcggggacgatgcgttggggtctctggcatttgattttatcggtagaggtgatccagcatcccggccgtggacgcgcgggtaagtctttgaacttgacatggagccttctcttgatagagacgaaggcgtatgggtgtaaggcgctttgacgatggaggatggg

SEQ ID NO: 3138 - DNA, 26007 bp, Xanthophyllomyces dendrorhous
gggggagcggtctttgcgacgcgaacggtgtcgagaggaaggtgttccccgttctttgtcgtcttggttgtagtgacggttatcgtctgaatcggactcgtagttccgcgattctcttctccgtttcgacctttcgtccgtctctctcgaagaggaaaccttgatctgatccctatcccgctccttgtctcgcctgctatctcgatcacgttcccgtctgccatccctatctctatctctgtctctgtccctctcttttcctttactttctcttgctctacgatctgtccgtccttctctttcggcttgctctgtgatatcatcccacccgctcattcctctgggtggtgatcgagatcgagaccgagactgtcttctcgatactgaacgactggatgaatccgtccggtcgagagatcctctggcgagagaagcctgttgacgaagcagagcttggttgtggtcatccactgagcgaatcatagaggataagaatcgtttgttcgttcgtgtctttggagcggccgaacttgtcgagctggagaagaggaagaagtgaaagacaaggaaggatggttgggacccgttagatcatgcgtttgaacgttttgtatacatcaagaccgtccttaagctcgtagctttgctggagaagtcaagaaggagaatacgaagagcacgaactctgatcgatctgaataagctcctagaccatattctttccagatcctttccttctcctttgcttcggaagcgatcaacgccgctacgtccgcgtcggacagagtaccggaggccgaactcgaaccggaagcggaagtggctgcgagaccgagagatgctctttgaaggtgaaaaataatggagcttgaagaaggagccatcgatgagaaggaggcaaagcttcagcaaggaatgttgctgcttctgtcggcgttggtgtgatattggcaatagcggggtgttgcttgtaggtggtgactcgatagaaagaggacgaatgttgaaattcagatgtcacttctatcgctggctctgttcaagttccgcttcttcttcttctcgttccgatcttactaatcgcttttgctttgtgaagtatcatcgatatcaatcttgagagatcccactgaccaccatcacaatcatctcgaccaaccccgtctaccgctcaaccgatggctacccctcctttcactctcagctccgctcactcgtacgcttggtctattcctctcgctttgaaattttgactcatctttgtgttgcatcctccgttctttcattgaaacggcacaaaccaaaaagaaaagtgaagatagcccaagcgctgtggaacacccaaaacgcaaacttggtgacagccgcttacactacagactccgtctggcgaaatcgatcgacgttcgttacaggccatgaatctatcagacagttcttgacaagcaagtgggagagagaaaagggatacaagttaaggaaggaggtaagtcgagcttggtcctttcctcggtttgcatgcgcgcatacatgttgacatctatcgtttctggtcggcgagaatccgaaagttgttttccttttcggagaacaagatcgccgttcaattctggtacgagtattctctggatcctgcattgaagaccgattggttcagatgctatggtctcgaggtttgtgtcttttgtttcttgcacgagaatgagtccttcggagaaagcaaaggaattaagtagagaatgacgttgtttcgtttgcggtgaccttagcattgggtgtttgcacctgatggaaagatggcacgtcgacaggtttgtttcccccctcgattttgtctatagggagacctgttacccaaagaaaccgagatgctgatctatgtaggacgcttgatcatatacagatgtgcggaaacgacatatcgatcgaacctcaagagcgatggttcaaagatgacatcgaccctgatgcgagttaccgtctcttgtttgcgctcttctgaagatttgagactgactgattgttctcggttgaaacagagcgtggagatctctgctgaacactggacgttggacaagccggtgttccaagagtagggatgataggtcctttcagtgaagagatctagtattatgcatgcgatattacgtatggagacttctattggtacatggtagtaggatacaacttggaaatcggacagatgcagaccgtaagatgcaggagaaggacagaaagaaaacagacgacatccgaaaagaagcgagagacaatttagtcgacgaacctgtacaaaggacaagagaactatactgttagcctttcgatcgaaagcagacgaacgggcgcagacgatcgagtgagagaaggaaagcaacgactcaccacggcgcacgacagacccattcggcatcatccaccctgccaaagccagagagatccactcgatcgcttacgacgacgacgggcagagcggacatcacggctctcaccatacgtgacggaccggcttcgctgattgtttcctagacttgatattgtagcaagagagagcgagagggtgtggatgaggatcgatcccgatgagcaagacaagcaggccaacaggttaaacacgtacaggaatagactgatggacggatttggtcagatggtaagatgcatagaacgatccgcctgcgagcagggcacactgcttgagcacatgggaagggattggtacgagaggcatgataggtgtgtgttatttaaggatcgggtgcttgggtagtgaggcaataagataacaaggcagtagatagatatacgatcgataagagaacgaagaagaagagaaagaagaacgactctaacggaacgatgtgcatctttataaagcaaacgaacgatggagcccgtcgagtcaaacgtcagcgaaccctctgaccacgggatctgccagcacgggaagcgttgtcagcattgcgcacacccggcactcgctcgctcgatcgatccattcatccatccatccatccatccatccatcctcagacgcaccaccgcgacggaacgaattcctgctctttcttgaatctggtggagtcgtccggggcgggaagggatcaatccttggctgactaagcgaattctataagccacgaggcttcgtcgccttccggtcgattcttaggtcttcgatcttccgtcttcgatcatccatcagcttctcgttctttccaagagagacagtgtgtgtgtatagtgtcttttatgtttgtgcttatgtttgcgtgtgtgcgtgtgtgcgtgtgtttcgaataatcccgttgatcatcgccgcttgttctgtagcgtgccaattcattagatcttttcgccgagaactttcatccctatggctccctcttccgctcctccggcatcggcctcgccggctcttgctttgctcttcatggattcgacagcacagactgacctgccgtccgatctttcagaatacttgtcgtccgctcaaactcttctcgcatccttcccaggtgacggatggggtaaaccaaaggtacacgccggagtcgtggacacgttcaaaacatccggtaaacctatcggttcggttaccgccgacggacaagtctggtgcgcgagaagatcgatccatgttgttccagaaggataccaggccttcaaggtagaacaaacttcttgcctattctcatacttctagttgatatccgaccggtgcattacccacccgttcactcactttcatccgtgttgactgccgatgaccttccgataccttgttggtgttacacccgtagaatggactgttgatcgatcatgccaaacacgagtcagagtatatcccagcgctgaaagaaatccgcctagtcgactcgctcaaccctgcagatggatcgtatactgctcaaagtgcgttgagaatgtgtttcctccttttttttcccattcaattatgtctcttcacatcccttgtatgcgcgcgaggcgatgttaactacggattctatgcggtttcaattatttcttcctcactcattctcattctcattctctcactctcacccacccacatacacacactagtctggagcttggactaccatcttcctagaccactttctcctagaaactttgtcatcctcttcttaggaatcgaaaccatcgttggcgaagagttcatcaacatctcgatcccggtcgagaccggccagccgtcagaaaacgtgaaaaccggatcggtgagaggacgttatgtcagcgtggaacgagtccggctcacgggtcacaaagagaacgaagtagagtgggtcatggctttggcttcaaccccaggtggggcaatccctcagttcatcacaaattcttccctgcctggagagatctcgaaagatgttggctactttctcaaatggcttgagaatagatcttagcgtgtgtgtatatgtatatgttgatgtatatgtcgatctgaatgtctgctctaccactgccaacgtcctctgtcctcataccatcagtcttctctgatagagagtgtctccttgcagtctgtaaccatggtaacatagacccggttacatccgaatagccgggactctgttctaccggcttgcccaaatcatctccatcctcatcctcatcctcatcgttgacctccgacctccgaccacggctctgttctctgtcctttgctttgctatcaagtcttcctggccggcctgactcctgtcggacacagatcctcccaatcatggatactacacccagcctgcaacccacagcatcaggcccagcctcaggctcatcaactcagatagaccccggtcgtcagactctcctcgactcggctgtttctttcttgagagatccaaaggtgtgtatcccgaggagttctcctttcgggaaagagagaaagaagagaaaatagagcaacactttctgaccgtttactctgataaccaacgctcaacttgtaccaggtcgcgtcttcctcgctctctcaaaagattactttcctccagacaaaaggcctctctgatctcgaagtctcccaagcactttcgctcgccggatccaacgtttcctcttcctcttctgattccccttcggccccttcttcctctgctcagaagagaacatatccttcatccgatggaccgacagataggttctcaccgtacggccatcaacaagctcagatggctcgaccagctctaccaaagagagattggagagactactttgtaagtcgttgtcgtttcgatacgtcctacacactgcgtaaaagagtctcaagatgatttctgatatcattgatgccgatatcctgggtccgattctcttctggtggatcggaggaaccaataggtgatggctgtgatctctggagggctgatgtacggtcttgtagctctcatcaaagtatatcttttacgtttctctctcagttgttctgttaccatgctcttcgaacaggatataacctgatcgttttttttaaaactataccttatcaaacatctaatcacctcgaacaactctagcattatatccttccccacctcaagcctccgccaacatcaatctttacccaaaccagtcaagctatccaagcacaatttgaatctttgaccacatccctccaagcactcgtcacctcgaccgaacagctcaaagctgagctcgagcaagacagagaccgagtcagaggtttggtcgaggaggttgagaggacgttaagtcaagttagaaagagggaggaagaggagagatcgtggagggaggaggtcatcggtgaagtagagggaatcaaggaagaactacccaaagttggttttcttgttgctacccattgcccacagggcttgtacagacgtgctaacccttctatcgcacccgttctccttctcgtacgatttagatgctttcgtcgcacacaactcttctccaatcgaatctgacgtcgcttcagacagaactatctaccctgaaacctcttcttaactcccgatcaaacccacccacattttctgccaacccccaaggtcctcaaggaatcggtcgtcccatgggctataacatcggtggtatcggagcgggagcgggttcggcaggtggaacacagggaatccctagttggcaacaacagctgtcaaacggatcatcgaccggtagtccagggatccctagctggcagcaagcttcagcaagtgaaatcccgagttggcaaaaaccagcggctgtgtcttcggggacggaagacgaggcggccaagataaagaccgaagaagttgccacaaaggaatgagagagctgtctgcctgcctgctgtacaagttttcttttccaattttctttttctttctctttaaccggccttattctatggaatctatgttgtattgttctctgcatgcttatgaccaaccgtcgactgaagacaaggagcaagtgaatggcccgtcgtctaagaatggccgaaggagggtggctatgaaacgatgacgcgccgggttacccgattttgccggtcgggctcaaaatgagattttcgcctccttcagttttccactctttccttgaccatcctcatccccttccgttcgtttcatcgctccttccttcctcttttgccactggaagacatcctgtcccttcgtatttagtaccagggtcgtttcgttggctctttgtcttttatttgtattcttctcagtccttgtttctctcttcagtcttgttcgctcctcaaactttcggaatagattcgtgttcataccgactctccatctatcgacacctccaatctatattcggcctttcaccacacttttcttcaaatacaaacaaggatgagctccaaaatgaagatctacgctttgcctcttgctaggaaagcaggatccaaacctctcgttgtgagtctctccacctgtcaaccgtggtctactcctatttcttgtcttcttttggtcttacacgccggtgactgatctgattagaactcgcttgtctgtcctccgtttcaatgcgccacagtacttttatacctctctgcctcctccatcctcaacggcgcccacgcactcgaaccctcatcctgataaacatccgctccgcctgaaaattgagcagaaactggacctcctaccgagcgcgcctctgcctctccagttaacagccaaggcgactgctttctggatggatttcgggaaaccagatgcggccagttggaaacagaagattcataagctcggggaacgttggatggataaaatcgatttcgaggagtggagtctgaagagcgtagaacatgggttggtaccggctgatttgttaggggaaggcgaggaatcgcacggtaagatcaaggcggctctcaaaggcgtcccggaaaagggaaaggatggagaacaggaaggtgtgatacggacccaaaatgcaagaaagcagagcgtggtaggtctcttctccctcgggttaatgtgaactcgtatcggcctgactttgcttctttctccctcataccgatatttcgaccagatcgagctactgtatccggaatcgcccaaaatcgacactcttgatacatttgaggactttcttaagagccgtaggtccttcatacccctgttctctctactttcctcttcgaccacctcgactgagaccttcctttctcttcttcgttcttcctgttcgtcaaaatgtaggccaaccgttccacgacaagatgttcaaacgaacgctcgcactcgttccagctgccttagcattcggaatcttgccgatcgtaccaaatttcccgttgttctatgtcggttggagagcatggagtcactggagaggtttgtcttatctgtctccttcatgtgtctctttggatatctcttcattttctccgtttaccttctcgagtcaaggagaaccgcgctcaactctcctttcgtctgttgtgcttcttcgattacggaataccaaatttttgataaaccagcccgaaatgcatccgcgctccttctgaacctactcgacaaggaccgaataaagccaacggaatccaaagtgctcactgcgctatacgaatcatcctctttcggcaagaagacaaagagcaaagagaacggcaaacaagaagaccgacaggttgaacggttcttgacggagaagggcgtggaggaattagtgggtcaggaaaaactcggagacgccgccaaggaagaggtacgtgtctttccttctttgcttctatcgttgccgctttttttctccccttcttcttttgatgtggctgaaagatggagatcaggaagctagctgaactaacacatgggacacttgcatctccatctttatgaaaattggattcgatcagatccttcgagcggtccatcagacagctatccggttacccaagtcaaaccaagaacagagcccgacaccagaatcacacaaggaaaaaacagactagaagcattccttcccccccccttctttgcccctattcttttccgtcccttcatatttctctacatctttcttcatctgatttttttttcaatttaaaggtataccaccaatcgagcctgtacacgtttccctcccatcgattcatcttttttcttcatcacaaatcctctcctctttctcgccttctcctcgattttctcaggatgtgtaactcttcctctcgctcggtctcatcctcacgctatctttgtcccttgcctgtcttcccttctttattaaggaggcatcacgattctcttgtttcacacagaataaacaggtcgttcactatagatgtaacggtgtgactccgttggtgcaaagccaaggaagcagttatccaaaggataaagaaaaaaaaatacggccggaggttgaacatcaagagaaaagaacgaataacatgatacatcgaaagaaagaaaaaaagatatacaacattgaaaggaggacagatcggatcgaatcgaatcgaatgggagaggagaggagaggaggggtgtcgttccctccttttttttcgtttaatatatgaatgcctagtctcatcgcaatctgattttggaggggtcgttgagagaatgagaatgtggcggcaagagcagtgagcgtccgaggagtaaaaagataaaccagccgagagactgaaaaggaagaaaaagataaggacatcaaacaaaggttgcaaggagggatgaagagatagtaggaaagatgaacgagcggtatctatatgagcgtgatgcgggtaacctcccgacacaggtggagggtggagaacaaagaaatgatgccaggatatgatagaatgacaaatcgagacgttatggagacgttatgaaaagataaacgacttgccacacggagggaggtaggtggtacaagatagaaaaacaacaactctggaagcaaactaaaggcggtaaaacaaatacactattcactagctgcttgctaaatgtgggaaggaaaacgatgggcgttcatcacctaggttcagctgcaattgaaggtggcggtcagaacagcagtcgttcacaaatgtgatgtgtctgatcaatagaacatacccaacgatgagccattcaaaagcgatcacgtcttcatcaatcaaacatatcgtaacattcaactatctagaacaaacaagatcgttatgtcaggtgcactgtacaagttaagagattggttcatcatgttgaagggtcatacggaaacaggtgcttgagtgcgtaaggacgaatcacttgaaatctgatagtcatcatgaaaccccaggggagacgtcagcctgcttccgactcatgtacagtcatgatcaaacttactctaagagggttcgaacgtccggtagaacctcaagcactattgattcaagctctccacttactgaacagttggcctttcagccagactgagcgccatgaacgcgggaagtgaaatcgcgcatgagcatctagacacacggaaagatgaggataacggatacaacatactctgccaaggggtctggcgcatctcgtcgtatgtctgtgtcacacttctcgattgctacaagcaggtcgttctctgtcgcccgttctagccgattggctctatcctctacgctgaccgtcactggatcccttgatgtcctttcatcgagattcaactttccgccagcactcgatcctatgacactaggcagatcatcgacacccataacggatacttggtccgtcacgctcagaacagggactggcgctgggacctccaaaggagttacaggataactcgcgcttatgtttacctgcgagacactttcattgttccgtctgtctggttccagatctacttgagctgagagaaacgggaaagtggggttgataggtgccgattgagttcgttgaggcatagcaaatgagggtggtcggagttggtctaacgatattgggtgtggttccgcaatcgagttctccaagctggcgtctgctccgtagtattcaaactttgagccggtatcagctttcatctcctcgtcctcctctgcctcatcatcgccatcgtcgtagccttcatcagcatcgtcttcgagagaaaggatgacccccttggcctctgcaactttttctcgaagaaagtcggtgttgaacagacagagcgcgcgttccttcttcttgagggtcaagatcatgtctgcgatctcttctgcgtatgtcggttcgatcagcgagatccctgctagtaaccggttgtgctctgttttaccggcaagagaattcgtacgggatagattgggtgttttagacaaagtgatttcttctcttgatgattctctactcggttcagtcttgatgacgacgactgaggggatttgaagctaggagatcaccaggagcataatcaaggcagaacggtcagtcacgatctatcactcaaatattggcacctgccgcttgaatagagagaaaaggaacataaacatttacgttctcatcaacggattcctcgtcagccgatccttgagtcatcgtcggatttgatccggtcagcatgctgacgagttggtcgaccccttgggagaaatcaatggatgtgatagcatgttcacgctttccctgctcgatcatgagcgcttcgtgtcttttttcgggactggaagagaacaagttgttacggctgaggctctgagctctcgtctggaatgtcatctggtagatcggaatcgagtcaagattcttaggagatgattctttctttacgcaaacggagtctatcatacgcacggcctctgcaggatcactattccgtctcgaatggcttcccgactcgggcgccaatcccaaacccagacctagacccatactctgtccttcgagatgacccgggattgagggaaaggccgcgtggtatccaacgctagggccgtcgggcgagcccttcaatcgaagctcggccaatttctcccctcggagttttttgggttcatgaagccgtaccaccatgcgtttggatccaagtagggcgcctattcagacaccagagaacacgtctttcacaaatcggtaagttgtccggggcacaccatcaatttaacaagtactgaccgtccatagcgactaaggcagcatgggctgttcaggataaagtggcgttggttagctcaatgctgcagacgtggtcaaaaatcatcaagttgcctaccctcttgaggtgtctgatagctgacaaatccgaatcctttactgtttccagcgtcatctcgcatgactcgagcactggaaaggcaagagagttgttcacatcgaagggctgagcggacgtaatcagacctagacgcacacaggtttggtaaaacaactaacctgacgattcttccaaagactctgaagtgagtgaacatatcattggaactcatcgaagggtccaggttctatagtgatagtaatgagtacacctatcagcagacaatcatggaaaaagagtcgagttcactgagacttgccttgcaaaacaaattacaagggtcgataagtcccgatacgctcgtcgaaccaggtccgaaggaaggcgcgggctgaacttgctggccaggtcctgttggatagacatagacagtcaagatgcttgactcaggtatctgacaaaacaggcaagaaaaaaatccaaaaaaaaaaaaaacagaaaaggcagaaaagaaaagtgggcgcaccatagtggccagcgttcagattcggactcgccagacccaacatatttggactacttccattcatgatgggcatcggaatctgactgagaggagggcttgccttccaagaaccattcatcccaccaccgttaggaacgaatgaaggggcaagtggagagaacccgaggaagggggatcggaagtagtaactcgaaggagaagacatgttggacattgaacgaagattaggggatagcggagcgattggtattggtaattggcgacgtggattgtaaggcacgatagatctgtcggtttgataggtgaatttggaagagatcagaaagagattttatgcaacgatatatccgatgacagggaagagttcttacagaacttcgccagtgggcatgataggctgtggtcatcaccagcgcagatgaagatggagagtgagtaagcagacaatctattggaccgtcggaccgagaagatttgaatgattacagggtttatctcaaaccagcgggcatcgtcctcataccaaaactcgacgagcgcttcgggagaatacccggtgtcccaatctatatgtcaaatccgacttatgtccaggttagtaagcatgcatgagaggaacagtcgaaatggtaccatgcagaataaagggagagacaactcgctttgatgcggcaggatcagagatcgtagagcggctggcctgagtgcttcccagataagaccaggtgaggtcccttcggggaacccagagatgactcgcggcacactatcaacaggagccgggaggggaacgaaaggagggggataaggtgaaagttgaaagaggttggagagagtggtaagagccttctcggctacagaagaggaagccaaagacggaaaaatcgaccgagatcagtgagtaacatgtgaggtatagatgtaagtgtgcgctttgggtaaaggcagaccgacctcgaacagaatctctaaattcgacggttcctacaccgacatcaagaacggcaaggaccataacccagaaaactcaggcttcaacactctacaaacagaggttgctatatgtgaaagccacttttgaagaaaaagacacaccttcgatagacccgtacatatcgaccgcttctctgccaaggttcagtctgatcggtagacaatcctgaaagagctcggcaatctcaccattggacatgctcgccggaagattggaaatgtgaaggatcgttcctttctagaaagtcgagacaagatgtaattgaaagaggttagtgacctcgagcaagtttattaaaagcgaacacgagatctcaagcgaaccaaatgggggtgaggtcgggcgttgaacatgatgatgtacgtgtatgctgatgtgatggcgtgggattgagattgagattaagattgcggacgttcaaggacgagactcagatctatatgggttttaccagtcggcacaacgttaaagactggagagacccaaaagatagagagagagaatgtatcagacggtgactgagttctgtgcacaaagagaaggttgaatgcaaacgagaccaagggaaacgacagaagaccgagcgagaggaatgtgagagatagatagaaaagagagatggaataatcgattggtctttggcaggaacagaaccagatgcacacgccaggggagagcgcgataggcaaaggcgtcggttgggggtgcaacgcctacacggtcgccagctcgtcttctggctactcactcaatcagcgtccacctgaactatcacttctttctttatcccgacgggcttgtgatcgatatcatttttgctcgagagagagagagagctcaagcacacgcacacacacacacatactctattgtgtacacatccttacgcacttaaacgtatccactcactcactcactcacatcatcacatacacactctcactcacgcactcactggattcttgttcacagcccaggaaggcaggcggtcaggtatagtcagcaacacaagtcaatgagactatttgtcagtcgaccggtctaataacagggtccagctcatgggttcatattgataaagggtccgaaagcccgatggcctctcttggaacgatcagatatgcacattcaccccggtacagcttcgactgagcgaaggaggggcatcactcatcgggtgggagtgtggtctagatatgactaaaagggacagaaacaaaccaaaaacagagcggacctattgatggacagggtcgactgacgtaatagctttctatcaaaggcccttgccgaggaacacgcccgattcgctcctctgccggtttccgctcgagccggttaagtccggaccctctgatctgatctcgtctgatttagtctaatttttttttctgtcgtctcgtctcgacatctattctccgatgcggatctagaccctagatcttgtccggccaggtcgttctacaggtgcgcgtgttctttgctcttattgacctcgagactgtttgtttgaatggatggatgaatgattgattgattgagtgaataattagatatagccaggcacagaatcacattcggagatgacggtgagtgagagctggttaagcagctgacaacatatatatgcatgatggtttctagtgaagggaattgaatgtgtttacgtgtgtctgtatagttatgatagattacaggaataacaaagcttttcttcaaaaactgtgtgtatctatttgtttggtaagcagaaaaggggaatgcagagtaataaaaagataatgtatgtagacagagcaggtcgttaaagagtttgtacagacatagaaggcagcaagggttgaaaccgagcgatcgtaaacgattgggagacacaagtcagaaatcgagatgaaaggagaaaaagacaaaaagaaaatcgaagttttgtaaagttagcgagaggaagaaaaagagacaggaagagctctaccgataactggggcttcctacgaggaacggagcgtttgtcgggggcattgacaataatgtcgaaacccccgaagaggacggtgatgatgaagaggagaaggagaacgcaggagacttcgggaacgaccgcgggtttcgagcaaatgtaagagtcggtatagacgttttcgagaagggcactgcagaagccggagacgaatcgtcagcaacaaagttccacacgacaaagggaaacaacgaccagacttaccagcaatgccactgataaacttcccagtcttctcagccgatcggcccttcttcgcccaagcctgcacaggaacttcgtcctcatccgccagatccccttcatcttcgtcgaaatcagaatagtcctcatcaaacgcattctccccctcactctctgatgagagctcgtcccgctctacacactcggcacattcgcagtcggaccctgcggagcgagaaggagaaggcgaagctgatgccaggcgagtaagatccaaataagtcgtcgatgggggcgaggtggacagaataggagggatcgacatgtcgacaagtccttgcggctgagccgatcgagcagatacctgagcaatctgaataggcgatgactgaacgggctgtcggacagtcggctattcgttcacaatatgaaacggtagtataagtggactggctcgatcgaggactgggcggcccaagaagagaaaaaaaaagtcaaacatacatagaaaaacctcagtggcttcctctgatcggatcgacctcgacctcggtcattgtcctcctcgacttcctctaccgaggcaaccttgaagcttctacggctactgtccgaagcagaggatgcaggcttggagactggaaagctagcgagaaacattgttggatagggatgtatgcgtgctagatgtcggggttgacggtgaagaatgggaaaggatgttcgcttggaagttgggttttaaagtaaaccttctacactttcaacagattatacaggagaagaaagatgataataaagagatatagaaacaggaagaggtcagcccagtcattcgaacgagaccctgtccagtcggagcagtcagggtgtaaaaatatcagtagaaacaactagtgaccaacctgatgtactctctatcgatgttatctaaataatgctttgagtgctggggttgtcgttgttgtttgtggtcttggtttttaagagaaggagaagaaagagggaaaaactgaggaaagagggtttatagatactcttcggaccaacccaaagccgttgtctcgatggcgtgagtgaggcatgatgtttgtctgagtgtggtggaaacgcgtgtcaaaatgatgaaatgaaataagatggcgtgcttaaaaaattcgatcatccgaagcgcgaaataataaaacaaaataaaatcttactgaccaatacacaatatcatccgtatatttcgttctgcttcgtcatgtttccttgtctctagtgattggtgatcgatgatcccgccaagtcactcatgcgatttatctacttgaattaccaagaccagccgaggataataatgagataagatctactcatacaatctgtcacgtccgctgggacatgcatgtacattatggagagaaacagagagaagagggatgggtaagaatttgaggacagaaaaaggaagagcaacatcgagcgaaacacccatgatcgggctcgacttgcaaatacaaccccaaagtcaagaaaagaagaagtaaagaataagaactaagataaagaaaagtataaaacaccaggcaaaaacagctgatggaggggaatcaggttagaagatgagaacaagtatagaaaaaagtagtcgtgaagaacgatccatgcgaaagtggacaagaagcaaaaggcccagacgaaggggtagttgagtgaaagacgagtggtgcgtgcaaatgataaaaatgcagagacataatgaaccgtgagggccaaaatgaacggaaaaaggattttgtgtggtagtgctgctgctgatgatgatgatgatgaggagtgtattggagaattcaagaacattgacagttcggatggaacaattctaaaatgagctcaattggctaggaggaaatctggccggtggaacattgggtagatggtggggatgatgaggaagcgaaggataggccgatgaatgcatcggcaagcgacccttctgaccattagggaatgaaccgactatctctttcggcagcttcggagacccctctgtgcctccgttcgtgagctgggctacatctgtcaaaggactcgagtgggagactccgttcatcgatgtcggcagctgaggaatacctaacgatgggctagacacaccattcatcgatggtgccggacggggaccagctccgttcgaagacgcgacccgacggagctgaggaggctgtggcggaggaggagcaggtggtctgacaagaatcacaggaggcggacgttccggactctcttcggctgcccgttgagcagccatgaggtgactcgaatcggttgataggagcgcgatatcactctcttcaaacagacttagtctgactttgaggtgcctagagaaagaagcaaaaaggtgataaagtcagaacaccagttgtgttccaaggacgatacaggcggaaaaaacggaaacaccacgaacctctttccgtattcatccacgacgagacgctcctcgtcttccagacctcgagtacccatacccacaccaaccgcgccaagctctgagtcgtatcgccaacgttctgatattcgtcgagcatagtcccgttgatcgtgtccatgggatgcgatggaaaatccttcgattccatccatcggctgagacgtgtccttagactgttccagagttggtctcgaatccgaacgaagggaggaccactggtctgggaagagctccgcagaaagaggttctgatgatgattgagtatagtaggatgatgtgcgaggagacgcaacaggaggatgttgttgacgatgatgttctgatttacgatcaaatcgcatgatacctcctcgacctcgtcgcggtcggaaggacgtggcgaaacggccagaaggccgagcggaggaagttgttgatgattttgcagcagatagtactgaggaggaagggaaggcagaagaaccttcaggtagcaacgggcggaaatgacgtgcaggagtaggaggaagcaatggttgatatgcgacctgaatgaagaagagaaaagaacaggtatcaatataattctaatatcggatgaaaaagactagcatatgacatacgtcggtttgatcttcccattggtaatctccttctcgtttgcgagccacgtctcgctcgatctgcattgcaatggcaaccattcgttctcgaagggcctcgagaggataatggcgctctccgggctctcttctctccttcccttcgataccaggcgccggacttccagtggcagagccactttcccggccagtcgttccattctctcgttttcgagaagatttggacgctttgtcctcctttaaagaactgagaaccgactcggctgtcttcgattttttgttggccgaaccgatgcctgttcggaacaagagctcttcttcatccggtctgagaggttgggagggaattttacgcttgatgtcgataagtcggagcttagcatcccatgcgtctcgctcacactgaataagatctgacttgcgtcgctccctttggagagtgtccgatgccagctgagaagctttgataagctcactctggagcagaacgagacgatctactgattgtgaatctgttcggcgcgtctttcgaacagacttgacctctcgtcgccggaagcagacatatggatcggcatcattggattcgtcatgctgcatgtcggaagagtcggaaaggaaaaaagaacttgagatcagaaacaaaaaaaaagtccttgcacacaaaccttccccaagaaacaccgccgtatggaaaggatactcacgttaagctggggaatgatgtatcggccaccgctggcaagtttgcgttctttccagtgaggatagatagctttagccatgcgacacagaatgccaggcggtgggacaccggcgttgatagagtatgttgggaaataggtaagaggtaacggatgggaaaagaaagattccatatcagtgagagctggtatgcgagaagtgtcctgaagtacacgtgaaagcaaagcaatatcaatacaacgatactcgacgttaactataaagatgtgaagaaattgtacatactgtatgcagtgttggcacgcgctcttccgtccacttctccatcaaagccatgaccagctcgaactcgtcttccgaaataactgatggaacaagctcctccttttcctttcctttgatccgaaggccacgattggggtcggacagaccgttaggcgcagaaccgttggcgatttcccctcgagcaagacggttatttttcttgagccactcgtcatctgtctcatctaatgtgtaagagaacccaaggccagacggaccggcacatgcttcctcaaccgtatcggaaaagcgcacatagccaaccggatcatgccagcgctggggctggtagagagcagtataattagtgattactccggtagcatcgggtgtgggaatggagtagagggcctcttggggttgtgtggtcttgtctggggagccacgggctccagcagaggaactagacgcgactgtacgtgaagaggcagaggctcgtatggcggctgctgaaatagcagcctggagatgatgttctagaagggacaatcggcaacaaagagaaaagatgcattcatcatgatcagcaaatacatcatttctcaataggaccgataacaaaatggttggcggtcaacagaatcacaagacggtgaaaacgtaaggatcgacaaggagagaagattaacgatatgcgagagagcataaagcgcatgcataagagtcgaaagatagacatcatccaagaattcgtggatgtatattgtttgttgttggttgactgatcctggtctcgtgggtcgtgtgtgcttgagcaaagacggaataagaaagaaaatccccatctcatcccgtaatttccgccgctctgccgcgagatgaggggaaaaaacaggtggcaaaacacggaaaaaatgacaggaacacggcaccttgccacccaaagggaaacccatcctccagaccgatcgaatgatgttgcaaccttcaaaaacgatagcaatgaaaagagtgatctcaccttggtcttctcccttttcgactccgtcctgattcaggtttgttttcgagttgtcgtcgtccaaaatgaccggctcagctccatcgatctccccccggttaatcccgagacgagtcttgttggtgagcctggcctgccttcgggatttcagcatcgggttgaacgaaatggatggatgggagtagagaatgatatctactggccctcctgaagagatctgaagcgttgaaggagggctttgccagggctgatgagtctggaaagggcaggggcaggaggaggggcgaaaatttgcacttcccgccacatcaacgatggaccggttgggcgtagaggagagagaaaaattacagagtccatttacttccgaatgccgaaaatctaacttgacattcgcgtccacgcgtagacacaacaccacacaaacacaagataaccagactatccgacaaaacaaggaaacatcaactacaaacacacaaacatccttctctctttagctttttgttctcttgcgtgtcaattgtttgctctcagtacaagatctcaaggggaagagaatatgggtaagtgttgcgtttgcgcgccaggctcaaagctcgagcacacctgtgtgggtcaagaagacaatgaatgagtacagttcatttccaacccgagacagatgatgaagacaagacatacaaggctgatcagtaaacgtacggattcatggctgaatctaagaaaagggactacacggccttctatgtcagctgctacacatgaaagactcaagatcgatcctgatgatgaaaagtcatactcaccgtcagtgatctcaaatggtcaaccatgtgtgcgctacggaacgagcctacatcttagaatttgtcaagactacgctcatgttatgattagaggaaactatggtgataaaacacgcgtgtcaattcaccagtaacagacgtggagaacagaagtggaatagaaaaacgtacctagaaatacatcaatgcgcacatgtgccgcaatactctaacttggccaatctgaagaggcctttagttaacactacaaaaccagcttctggtatcgcatgaattgagattgaccacatccctaccctcccagagcagcctgatgacaccctgtggtgtcttacaaaaagcatgaaacgtcgtagatcgtaaaatgggcattcttcacaacgctggtttttattttattttattaaggagcctaaactttcacatcgttgggagtaggtttcgaaactccaaccaattcggggtgcttgagagccatgatcttgtccacaagctccttttgatgagtgttgttcctggcctgcatgctgtttgttcaggtgaagttggggtcagaaaaaagagagaaccgaatgaaaggagagtgaagtgaggaaactaaaagatttccctggagaaagtaacattgaatgccaagaagtgatgcaaggaagatcattcacgcacatttgagagtagatgatccatatagggagacctagaccgacaatagtcacgagtgaagctaggaaagagaccagacagtttaagaacatcgatttgatgagtttctatagacgagataggcacagggctatatacagcagaagaacagaagaacaggaggatcaagaagtgttactcactaaggaaagcatggaacttcttccttcgtggaggtggggggggcaatttctgattgttcaaaacccaacgcatacagaattgtcctttcaggaagattcacaaggaacgcaaaaagttagcgagttttctctttgtaaagacactaacgtcaaagctaaagacctagatcgcaaccacaagaggaaaggaacaacgtttgcgttagctactggaagaacttggcatacacctgatcaaagacatcttccttggcctgtcaaccaaagcttcagacctctaaactgaaaagacatacttttgaagaaggctgtggataatcctcagcagtggcagcaggtagcctggatctccattgactgatcgcacccgtagattgagctggagagatagcggtcgattcagaggcgacagcagaagccggattcaatggactcgacctcggagctgctgatgagcgaaaaggagatccgaagaagagtcgagaaacggaaggtctcatgttgtcaacaagaagaagtagaggaagcaagaagaaagagtaggaagtattgaagggtgtaaacgtgtggacgatgggagtgaacggtgtggagtgaacggaaggtgctgaagagtttgcactacatcagaacgcccccgacccgacacagttagtccccatcaatcttaggtaataaatcataaaatcacaactgaagttagtcatgtttcctcacactcgatactcaaacgtatacgtctatccagacaacatcaagcatgtctattgtaacaacaggtagatcaacacacatgagttcacatttagaacaacatcaatctaataaaaagcgagaatagcgcctatgagctaattcttgccaccatccttccagatcatatctttctctatagcttgttcaagatcctgttcagcgctctcagaatctccaaggcctgactgctcgaggttttcttctggactgagagaatcacattcacatagggatttagtatatatgtcttcatatcagagcgcaggtgggaagagaagaaatatgagatagactcacgttttccagatgtttttcgcagcatgcatcaattcataaagctgtcccatttgctgagagggaacaagcgagaaacgacattttttgataagaaaacagaaagaaaaaaaaagagaaaaaggtcgcaagatgacaggtacgtacctcattggacatctactcatcgccagaaagagaatatttcaaaagttggatatttagtctaacctcctgacacgccaactacgagtcgcaaacagaacacggtcataccttctccaatttctccatatccaatgttcttcctcgatcgagctctcccttctccaatgaatcaagataatgtttccattgagataagaatccaatgatatgtaacgggttgtccgtcgatttgtgccgcttaaactctatcagaacagagatgcagggtatgtagcacgaacaagaagaatgccaatcgaggcgtatgtcaatgcataatccgttgtgacaggtacatgaaggttactgatatgacataccgtctcgaacataggtatcccctaaagaacgcatgtctattggaagctttcggtgagctcgaagtagccgtcgaaacaacctaagagacaagtgatataaccatgattaatgtcaatatttctagtgttcgctcattagtgaacggttaccccagatgggtatgagtccactctaggatcgagaaagtagttcgaagctcacgggatcggcggcaggagggcgacactcgcttctctgacatcacgaggagctttgatgacggtggccgcatatctgacagccagagtgcgttgcatcgtgcgagaaagagagagaatgagcttgagctaaaagagaagagagaagagtgggcgaaagacgtggttggctattatgtctaacacgaagttagatgatgatggttatgatggccggatcaaaattcgggcgattcccttcgatccctgaaacatcgcgccgttcgatattttgtctctcagtgaccttcatcaacatccaatgatctccataaatcctaaccctgtcgtcgactcggcatatctgattcattcggtatgtgaatacatcagtacccaatcgagttaaggtgagaagactgatatatatgtgtcatgattccaatatataaaagcaagctcaagatgtcagattgtcatgcaacgagcagatcgaacaggcggctgaatctgtgagtatcctcgcttgcttgagaccaaacaatcgaaactgatcagattcgtcttgacaaccgaacagctccttccctatctgacaacatattctcctctcacgtggcaaactcaaccgctccatctactaccagcatcaaccccctcttccaataaatgttcgctccaatttccgaaactcaaatttaatcaggacgataaggcctgcttagactggatctttttcgtatcatctttgaatttttcgttctggagtgatctgccctctggagagaggtggggaaaggaatggtatgcggatggatggaagggactaggagggaagaagaaacgttgggaaggctattggggactcttagccgtcgtcaactcaggtacgcactcttacccagatttgcgtatgctaagcaactcgatctaaaggacttattcttttacttcgatatcttccttcgcgatactagctctagagaatggacatcccctcacagacccttcattctattcatccactaactccgccgatctcatcaaatctcttttcgcgccaacttctccatcaaaggaagaagttcctcttcttcaagatcggctttccattctccagaagaacggttctatcctctgctcgcctagcaacaactacaacggttcctgggctggatttctggaagatttcttctccaaagatgagagaagaggagcgcttgatcttgtcaaagaagtcgttagagtcttcgagagttttagggacgagggattatggaagggagagaaggtatgcttttggaagagagctcagatcttagttgcagagacgtggtatgtttgtttcttcacaaacgcatcaatctagccccgagtttgctgattgttgatgtaaaaacctgattttatcttgaaagggctgcattctatccttctgattcatcgatacctcatcctatcttccctaatggtcttggagaacttacaatgttcccagactatcgagtgcgtgcttcttgatcatatctttgccgtcttgtatgcggaatcaacaattctgacttgattatgacgggacctctttaaatcattatcaggttcctcaacatttacatacgttgaaactgttgacatactctccctctctatacgaaaccctttcctcgcatgctaatcttcctcatggatcgaggctcgagatggaacttcgcgctggctcaatcgtcgccatcgaggaagtcagaaagacccttcgacgacttcgagatggggtcgatatcgagagtgtggtgttagattttctgatctgggatttagccaaagagatggaagctaaagcggcgaaggaaggaggcaacttagtagaatgtcaccgaacgaggagtatatattattgaacgttgattcaacttgtgtgatatgaactgcatggactagctatcccacaggacttgaccgcatctgcatgaatgttacctctcgcaaccctaacaaggataaagtgacgtcatttctctcataaacaatatgtaacggtaggatcatcaacagctgcttgcgggcagccgtgatcaagcatgtcttagttgatcttgtggacgactctcctttcaacttcaagtacatcccttaatacatctctgctg

SEQ ID NO: 3139 - DNA, 5898 bp, Xanthophyllomyces dendrorhous
gacgctgttgtgtctgtcttccgggctgtttatgatacgttcgtagtacatctttgtttcaaaccttttgaattactcattgacttcttcttggtttttctaattataatccatctggtgtatccttgtatcaggttctacgccgtttgccacacaatcttctctgtattggagaatgcgacgatcctagtctggaacatcgttactgggatcctcaagacgacattcaatgtatccgaagctacattagaaggcgtcgccaagctgttcgtcgatgggctagagcttttgtggagtacgttctgttatcttcactcgaaagataagatgctatctttacaagcgtacgagtaactgacgataagtttacggaattatcattcgttttgtggggtttcagataacaaattggttatcggagctattgctttggtccttgttgtccttcaatctcgaacggctcagaagacggctggtaacataaagcagaaggctaaatctgcttaggcagggcactcttctttcctttgcttgattagtataatttgaatattccaagttgtaataactgtcttcctcatcttgatttctattataacctcgtagtcttatcttgtatcaatgtttacatagtttgattctgacgttcaacataattcagctattttgtatacaacttctcactatcaccttatcaaacaattttcagctatagaaatacggcccatcatgaagcaaaggatgctcagaataatagaacaacacaagaaaagaggagttggcactataagatatgagagaaaagcgatcagaaatgaatgtgcactaaaagatatcaaggaagtgaagtggagtctgggtatcaacggatgaagtgcgtgaagtcaatagtaagagaagaaggagatattgagagaaagaaagaatgggagaagcaaaaacgctacagcagctaccatcggttaccgttccactcatcatgctctccagcatgcgctccttgttgtttccggcctagctgctgttgttgatggtgatggtgctgctgttgatacatagattgcataccccccattccgaatcctaacccaacctgtgccttcatattaagttcgcctgccagcccttggccaccgggtcgatacatttgcgctgcattagctccgtacatggctcgggccagatccatcgagagaatttgagaagagatcgctccgttggcagcataattttggaagtaagggttgaattgaagagaggcagggttcaagccgtagccaggggtgataaaaggaggcgaggccggactaagttgaagttcgggtcagaaaaacaaggtacaccgtatgagtaacatgattgagaaccaagtcagatcccaaaagaaactaccaacgttcgagggccggtccaactctcaggactggaaactgcttcctcttgtgtaggtgagcctttcttcgtcttagcagcatcttctcgcacgcccttttgagcggagttatcagcaaatcggacgaccttttatacagattgacaaatgtagacaagatgagctattcaaactttagtcatccttttatacgagagcagatcaagacgtaccaaaggagcacttgcgcctgacaaaatcttgccatgaagcttcagggggtaagttgaacgaagaggcgacatagaagggaatcaagaaggtgagctgcatatacaacaacttctcgcgaggcatctatatttgtaataccttgtcaatcattagatgagcttcttctctggtttgaagtctataatgtcgaccaagtaaggttcactattcagcatcaccaagaatgcccaacagaacgagtattcttaccgaacaagagcctgagacacgaatttagatgaaaacatagataaatattcggcgcataacaaaaaatggaggatttatacatacgacaccctttccatcgaccccacctttgccgctttccagcattttgctcgaaacgatgatattgggcacaaagagccgctggaataagggtagaagtgatcgtacagttgagtttaagaaacagatagaattggtataagatgtgcgttgctgacctcgagagcctgaatatgaacaatttagagaaagaatcagcagtgttcttcaaacacacacacatgttcagcaacgatggatacgaacctcctgagggtagttgacaggcaaactatagatgtacatgaaagtcatcagcaccaaagcttatagacgatagagtgatacctgacatttactttttaacatagaggttggtctcgaagggatctgcaagctgtgatgagaaaagcaagtcagcgcatggtctggtaagcattgatgcagatacaaaaagcttaccctctctagcttctctttgagggtttcctattcgcgcataaggtagacatcaacctagatgagcatacaccccatgtagaagagacaagagagtgaccaaccttagcatacccaactttgtaccccttttctgacaaaccttggatacaggctacagcttgggggactgagcaagagacagataacatcagattaaactcctacgtagacaagaacgaatccgacacttacttccagcaaacatgatgaatccaaaggactttccctcgccaggtttggcgacaaatctcgcacttcgaacagttccaaatggagcaccgagagcacttaactgaacttcgttgcatgtgggaggtaacctagacaggaacacttgattgtgcacacaaagcatgacaggtacatcaggtacagccgaggtaccaatgttttcactgaagcagcacataccagtgggagttggggtgggaggaacaagggtcggagcctgcaaaagctgaccggctgcactcaaagtgataaaagtatgaggggtcagaagcgctgcgagtgttttgatcagatcagaacagaacaggaacaacaggcacaaaccctgagggccaaactcattcatggcaaactgaggagtaatctggccagggtgtccagacagagtctgggtttcgggaatagccgcaacggttgcatcctggtgagtagggtacattgtcagaaatcagttagtttgacggaaagaggtcgggggtgtaatgggcgacagggatcaatgggatggtgcgaaagatcaaagttgtatggataatatgcgagtgatgcgatggagaagatgagttggccggagattgatatcggctgttttgtaacagcaacggtaagtggatggtagggaaggatgtgccgggtggaagattggaagatgagctcgatagacgggacgaaaagaaaagaggaagaaaagaagatgagaagagaaagaaagaagaggaactagtcgaggactatctttataatgaataattgacaggaacaggtcagggtcgagacaggatctgtgaagagactagagaagaagaaaacaacaagccaacaaacggagtggtcattttttagagcctctacgagggacaatacagggatgaggcacaatgaagtttgagctaggcaaccgatcagcagccggtgagccagcattcatgtctctatactcatgatcagtaggggcaaggaaacatgagagatttgatcaggcagcaaagtgtttttgaggcaaagtaagcaaagtcactacgcatatgcccattctttcaagtctgtctattcgtccaagtggaagcaagggtgacgccttttctccgagaaagaactaattatccaaagacctgccagcgatcaccatcaactaatccaatctcccttcctccatgaagctccaccaagcctctgacttccttgtcccttggggattcactgagtatcccacgctgatcctccctgtcacacattatagcccctgttcgagcgtcccaggctcggatacgtctatcctgacccgaagctaagatcgtacgagatgaagcatgatacaggagagggagacccgtcgagtatgtgttttgatgcgatggaagagaaatcaatggtgaagtacagggaaccattgtcgaatgtgctttggtgacgttagaaggcaaggtcggagatggagagaaccggctaggtttaggaagaaatcgaagatcataaatgttcaactgtttcaaacatgtttattgaaggtagagaacggccttgaattgtcagctaggctttggtgagagaagaccggacgtgactgacgtctccattcattccaccgcaacaaacaaggcctccccccatatccaccatccctactacgggagtgcccaatcgaatcacctcgccgccctcacccagattctgtttctgccgttgaccttgcggatgcatgcctcttccaccttgccagctagaccgagtgtcaaacagcttgacggaacctgaacgaaggccagccaaaaaagtcgagggggaaggtgagaggcaagacatacagagcacagatgacttgtcggtagcgttaacctgaagatgcggagaatggattggagacggcgtgctcaaaatctgagaatcgcagccttgaaaaggatgtcatgaatgatcaaatgattaatttggaacaacaacgatcaggtttcttctcgtgtcttgaatgattttgatcataggacgcgcgcgaaagcacagacctaacacaatgcctccactaggaaggaacaagctggaccatacgtctgttgccttttgaggtcggatgataaacattggtgtactctcctgatctagaggagcatgcaagagtcctggagacggtccgaaggaggtagctatgaatctatcttgatgtatattaatggatgtaatctacggaaagtaagacaatgaaaagaccaggcattagtcctcagtcaacaagcctttcttcattaaaattctacgaacaggactgttcatcagatttatccggaacatccatccagacgaagaagacatgttcaaagaatggatcgatcctttggaatcgcccgccaagactacgtcatctttcgcctgttgaggcatggttgtggaacgttcaagaagggcaccaataaagagtcagattcgtacgagaagaacaagttcagagctaacagaatgctacatacagctagacaagtgacgaaggcttcgggggtcgataatggtagatagctggattccttcgagacgaagcctaacagcgctgctctcgataaatccctgctccagcgggcgtcaaaccaggagatgttttctcccctatatgaggacacgtctgataaagagaagagacgagagtcatataagaagaaagacttactctcgagacctgtccaaacttctcagtgctatgtttcctcttttcatctcccacaatgctccaaccgtcccacctcctccaggaagattgaatgctctctcctttccctttctcgactctttctgtaatttctcaaagtgacgcttggttggttggtcacgtctttcagaggaccgagaggaaccagcctgagatgaagaggacgagggtgttgggctgacgtgaccgaaacatcatacaatcaacacaagggccaaagcagtcgatagattggcatggttgaataagctagtatagaaaagcgacacagagccgtgtctatgacaatgactcaaacgaacaaatatttcttctttatgggatcatagacaaatcctgtacaccccgagtggacataagcaagctgaagatcaaacacaatcaaagatgaccagctgactcaccaggaagctcgaacgcgaaagacatgctgatatctgaccagataatgtgaactcgagtcactgattgaatgtccgagcgctagcgcttcctaaaattcaatcggcggtgcgcgattggcaaagtcgcctattatctcaagatgggggtagta

SEQ ID NO: 3140 - DNA, 7580 bp, Xanthophyllomyces dendrorhous
tgggggtagtaaccggcaggttattctgtcggctaaataactcaagcgacacttaagcgtcttatctctttaaaggtctctttcaatctctttctttcctctagatctactttttctttcgcccacgttcagatcctctcatattcttctgcacaacatcttactcttcaaaatgattaccacctccgttcgaacgactgcctcccgtgtgggcgcatttgcggtagccactcaggcttccgctaggggattcgccactccctccactaccaatcatgaggccttggtcacgatcggtcgagagcacattactcaagcaacgtgagtacatgtgctctagaattgtatcttgacaccatttcttatgaatgtattaaacccagtggtcgaaagtgggacgttgttatggaggagggtcagggcttagaggtcactctaggagtatgttcaatcttatgtttcttcgtgttcgaagatgtgtgattcactgatgttcaaaacctgctcaacgaatctttgaaatgtaggatggccgaaagatgcttgatttgtgagttcaaccatccctatcctccttgcatgcagattcgagttatttagacctacgctattctcttgtccctgttctgtgcagcacgtcgggtatcggagtggtaaatgcccaccgctgatttttggcttacaccgagaccatcgagactgactcggtatctttcatctgttgatattgtagaccaaccttggacactgccacccaaagatcaccgctgccgcccagtctcaggttgcaaagatcgttcacgctcagaatgctatcggattcaaccgaccgtacatccagctcggtaggtctcttcgcgtcgtgtacttgtatatctgctgttcatcatcattaacattcgctattgatacagtcgaacgattgcttcagcgaatgcccgatccttctctttctaaattcttcttatggaactcgggctctgaagccgtcgaggcagcgatcaaagtaactcgaaagcataccggcaagaacaacatcatagtcctccaaggttcataccacggccggacatacggtgcttctgcgctcaccaagagcaaggtgatatactctgagggagtcggaagtgttatgcctggggtgcacacttgtccgttcccctactggcacagtcttggagttagcccagatactcctgaggacgagctagtcagaatggcagtctaccaattggaattgttgctcaagcagaggtcgagcccaatcgatactggtaagtatatccctctgttagtctcatttagacgttagcttcaagtgactcacgattgatcttgtcgatggaaatcatcttctcagccgccatctttattgagcctgtcttgggagaggggtaagtctcactaccatcacatatatctagaaacgggatctaacttcttttgttgatttggtttaaccaacagcggatacattcagactcccgctgcgttcctacgcaaggtgcgagagatctgtgacaagaacaacattttgatggttgtcgatgaggttcaggtcagtcacatggaacacaggctgatccatttctcttcatatgtcatctgagtcaatatttttctcaatctttttttccgcaacatccaaatcttattgtccatgttctcgaacctcagtccggatttggccgaaccggaaaattcttcaacattgagtattcaggcgtcaggccggatgttcttatcttcgccaagggacttgccaatgggtatgtaccacttggcctgttcgaagtttgagatgtctctttctcagttagtagccatggctaagttgtaatccgtctgtcctatttacctgatggaacagtttccctctctctggaattgctaccaccaaggagatcatgggtagcatgcctcctggttctcttggaggaacttatgctggaaatgccgtgtcatgcgctgctgctgtcgccgttcaggatgtagtaagtttacttttgttcttcctgtacatgctaagcctttatgtatcgttgacctaaaccttgtcttcttccatttctctatcagttcgacgagcaggatatccttggaaacgtcgtcgcacgatccaagcagatgtttgatgctctccacaaggtcgccgctgcgcctgagacgtctcacttaattgctcaagtccgaggttctggtgtaagtaatcgacatatagtacaatcgctccctcttgaatcgattgctcattttatttttggttttgtggcattgggtacagctcatgatcgggctagagttcaatgctcccaacgacccgatttgcgagttgtcgctcaagagcggtaaggcgatcccaaccaacatccataatcgagttcaggagaagtgcttcgagcagggtttgatgctgctcaccacatctatctactctgttcgttcttttcttacatgtttcttgctcgttaagatatgtggatataagactaacattgttgtttcgcgcctcttacctcattaccttaggttatccgatttattcctgcgcttatcgtgactgaggaggagatggacaaagcgatcaagattatcacccaagcgtacgttgaggatttatttcgtcaagtatagcgccccgaatacgtccacaatgtgactaacatctctttcttccattttgggcttatatagtatccaggaggtcgcccttgagggttagaagagttcatgatcaactcctgaattccatataagaaggtcatatatatagcctaaggtttcgccaactcttgtgaactcctcataaataacgttgtacgactcgctggaatgagacgaaccaaatcagtctcaccaacgttcacttcattctcttactcttgtacttaattctcgactgccttatatctgctttcatgtctttctggatcatatataaatttgatgttatatgggtttctcataaatctacaaatgtgcctacatgcatcagaagtatgtcgtatacatttttgattaaacgttggcctaaataagtcatctcattcaatgattactcgcaggagacaacacccgatgaacctctggaccccttttattcagtcagctgtttccgtcttctctccatctcgtcttcttcaggtgctcatccgttaagctatgtctcgtcctacgtctcctgcctcacacacctctgaacacgaacagatcgaggaacgacgacaacagcaacaggaacagtccactccttcctcccctactcgatctcctacatctctcgacgaccaaagctcgaccttacctctagaccctgaagaaaccttaccgtccgacaccgatatcgaaacatcgctgaaagctgatgatcctcaagcaactgagccagagactgtagacctgaccgaaacagctgctcacccagattcagtcaagccgtctccagagacagtggtgaacgatgtacaggtgtcagaagaagaatctgcattgctagacgactcgaaccaagagggaccaggtctgatgcgcacaaagatctcttcttcaaagaagactgagcggccgatgtctgctcatttgcacagctctggttcgtcttatgggtctcaagatcctaacgtagtggtttcagaagaacgatctgacgccgttatagacttgacgtacgaagaaattgaacaacgttcggttgcatcgtcttctaccttgagatcatctctacctgtatcgacagaagacatgcccttatcaaccacaatccctaacgcatcttctttgaatgagcctgatccttcttccaaacctgtttcacctactacttcccacttgtcgacagacaccgcttttgcgcttgcttctaagccgaaaggagatcgaacctcccttctgctctccaatactaccaaacaacactcccgatcaagttcggccgagggtcaagcactccttaaagaggagttcgataagatacgacagtcatataccggtcatggatccccgaaactataccatcatcggggcagcagtcgggtgagcttacatggaaaaagccctcttgtaggcggaggaaatgaggaagatctttgggacagagtaaagacgggagctcatttggatggccaagttgaaagaaccgatctgtattcgagtgaattggcagctaaagatgacggagaggcggaagaaatgttcgatgagccgctagttgaagacgacaatggaggagatgttgactgggcattttggggagaggttatgaatggtgcgtcccctttttacaaagagagaatctcctataggtactaaatagtgtttcgtcttgagcctctcaatctacagattatcaagctgttgctaaggaagatccggcaaggcttagtcaagctatccaggatggaatcccagatgtgattagaggatcaatgtggcagctcagtaagtgatttttttcctcatggagttcatcatcaagactaatctaattgacttcaatttacacgttgaacattcagtgtcgtcatcaaaagattcagaactcgaatctctgtattcaaatttacttcaccaaacgtctacacatgaaaaatcaattcaaaaagatcttgctcgaacctttcctactcatgcattcttccaacgaccgacatccatgttggagcgcacaaattcatctgaggacagaggtaggggtcaggacgagctgtataatgttgtgcgcgcttacagtttgtaagtttttgatctttggccgttctgtgccccgagtatcgaggggcatcacttatgtcttcatctctgaacatcatcatggctagatatgacccagaagtcggatacgttcaaggcagcgctttcatcgtcgccgccttgttgctcaatgtatgtatgccgtgtcgttgatggtcttgcacttggctttgtaacgcctgactgatcagatgtgttacttagatgcccgacgaggaagctttttgcgtgctagtccggttgatgcattctgtgcgtagtcgacacatcggccgttcttccaagcgaacatattattgattcttgtttgatctcttcatctttattcccccccaaaattgacatagtacggccttcggacatctttcttaccagaaatgcctggacttcaactccgactatttcaattcgaccgactaatcgaagagtttatcccgttgctacacatccacttcgtccggaatggcattaaaagttcaatgtacgctgggcagtggttcttgaccttgtttagttatcgattccctctgcctattgtctatagaatcctcgacttgggtatgtccatcatattttgactgaatgagaacgatgcgactgaccattcatcctctgtcggaacacagtgtttgccgagggaatcgaggctgtattcagatttgctatcgcgcttctgctcaagaacgaagaagagcttcttgctcttgggttcgaagagattctgagttatcttcaaagcaagctatttgatacctaccgagtgagttacatcatgatcttgcacttcttgcattagtcaatcttgactgatgtactaattcctgccggcacttcttttctgaatacaaatctcaagattccacccaaggatgatgataaggaacaagaagaagcctggaacgcggatgattttgtaaaagattcatttgcagttcgaatgtgagttgccagaatttgtccttcgcgtctgttcttgaccaaagatgccaatccctcgctgactataaacgtatctttttgttcgattaagaacacctttccaattggatggctatacggccgagtggcaagatcagtgtcgcgctcgggattcacatgcgattgaggtcgacctgcttcgaacagctaacagaaacctttcagcacaagtgtgagaccctactgcattcatagtgttggggttatacacttcctatcgccagcgtgaagagatctttgacaaccttcttatggggcttatctcttcctaaatcacagtaaacaactagaggcaagcttggctcaactcaatactgaacagtgagtcttctgatcctactgtatgtcttctggcttgatggatgctaaacggcttctgtctcatctctttcttacagttgcgagattgtcaagcaggtcgttattcataaggtcgagcgggaagagatggagaatgagttggtcaagtacaagatgctgtgtgttctcttcttttgttttaatacttgctctgatcggtagccatactgactccctagtctggattctgtcggtctgatctagatatgctgagctgtctcatcaatcagccgagtccagacaacgatcctccggatcctctggcacgtccggcttttggggtttagggaagacgatgggtcgcagtgttagtgtaagcaacgtcaagaatacatctggatgagttctaagccttggtgaacactacgccttgaatgtatattttcatttcaatattatcatctttcttctctcatactcaacgaccatattgcattcataccttgcctccactttttccccattaaatctctatcttctcacgctgtctttaagcttcaatcccacttttttcacataccccaacttatacgcgctacccatttgatgatattcctatagagctataggcctctactatagttccacatttttgcatgatatgtcttgacgattttgtcggcggtctgggcaaagtcttgtaggaagcgactagaaggttaatcaccggttcagttggcatggcaacccaagggaaaaagttgatcccctatcgatcaaatgatgatttggacgcattacaaccatcaagcggcttacccttcacacatactcccaacacacatcatgtccgcgctttcccagtaccaagagttgagtaagtgagagtatcccatgtgttctctttttggcttgagagtctcatccttgtggttcgtgacagttccctttcttagggatacaaaccctcaggtccgacagcttgctctttccaatcttctcggtcaaaccgtgaagacatcgccgtacagacaagctttgttcttcccttcttcgaacctcagcaatccaagcaacacatcttcttctgcttcatcagaggttgtggatgcaggaaaggacgcagctcttccgtcgtcaagtaatgaaaagagcccattatggagtttgaagcttctctgcagagatcaaacgatgatcgcccacgatgccttttcggctttagttaacttgagtgattcggctctggtccagaaggaattaggagacgatgccttcttggtcttcttggtgtcttatattgttgtgcgtggattttgtcgctcattcaaggaaactctttgcaacatatcagcttcgctgacaaaccacttttcgcttttctctacaactgcttcgtattacgtgttaatttctttccatttatccgaatatgatactatgcttgcaacgtcaatatgtagaaccctacctcagtcctctcttccctggcatctatgctcctttccaacatcacctcctccctagcaatcaccaagtcactctctaccctt

SEQ ID NO: 3141 - DNA, 40606 bp, Xanthophyllomyces dendrorhous
ctatcttccttcgtccagatcggcttcagctctgcctccgcccaacatggcgcttcccaaccaggaagtaacggtcgaatatgtgccttgtttgagtctcttggttgaggctttcatccagggtgcggcagctggagagcctggaaaagagggggaagaagcaaagaagggcacgaggaaaggagattgccatttcctggcaacagttttctcaaacttgtctatggtaatttcaacttccttccagtcaagatgaacgaagtgaacaagtcatgtcaactgatctggtcaacgatctatctgttagcttcctccaatccgacaagctcttctgtcccctgccgtcgaatacccgaagcatccggagtcaaccttacctgctactccagaagcgcttcgatcggagtctctgcttagcaagctattgatcttcactgagcataaggatacgattcgacgaggaggtgtgctcagtacgctcaagcacattgccatgagtgcgcagactcatcccctcctactaactttggaaggtacgtcttggaaaaatcccccatcttttttcagaaagcatgtatgcgtggcatcagacgtttgcttggattgagggtacgagagctattcactcatgtctatacgtacattcgtcttcactgcttccaacgatatccgcatcacagactccttgattgcggtgcctcacctttcggacaacccccttgcccgttcgggcgacacaacatcgattgagattcgaggagtggatgtcctacccaagattctcggtcctctgatgggtggggaagagatcgacttggacgatatggaaaaattgccatcagctttacagttccagccagaagacaagcagagggagcaagacggagtcttgaggctgacgtgtgtagagattttgttgcttctttgcacttgtaagtttggattagcacttgttcagatgttctttttcttcacacgaagagagaaaaacgaacttatgtttttgtcgtctttctggatgacgaacagcgcttcgaggacgaaatcagcttcgagaccgaggcgcgtatgtcgtcatcaagttcgctcataaggccgagaccgacgaaaaggttcgtttcctcacctgctcatcctctttagactcgctctcacactctgtccttttttttcgactcctttcaaagattgccgaccagatgtaccgactcgtaaatctgcttcagcgagaagaaggtcccgacactcgaatcgaggagatcactccggacgaggaaactgttgacagtgaggatgaaggaattgtcgaggtttgaaagaaagaacgaacaggagaacttcgtattcgtatttagatgatcatatgtgcttatccttcccgagcgctcttggttgagcacctctaagtgtggacctcgcatgacgacatgaacatctacatgtgccaataaataatgtagagaatttgcctataaagagttatttgtcgaaacatcgaatgtgtaacttagccaaactgaatgcacgatgggccagatgagaaatatgggaggagaggagatacggattctatgctatggaagtggaagaaaaagaaaatgtctgagagaaacgtcaaacgatcaaccgaggtaccaccagatcagagcgaagcagatcagtgtgcctgttgcgcccagaaaaaatatgatagtatcttgtttactgtagatgattcacgcaagtcatttgggcaagcgataggtttaacaagccaatcagttcgtcggcaggatgtctctctggatcaaatgactagtaaggacggaaagagatctaccttcttctttccacccagccgacgacttgtctacctcctttaatcccgtttgcagcatcgagtaacctttttctggttcctttcagccatccccgttgttcaaccaaacttcccaagacttccctaccttgactgatcaatagatccaattgggtctccgcattatttacgaaaccttcttctcgaagcgcgtaagcagcagacgcatttgacgtgccggagtataacgaggcgccattagaagagttcatttgatgaggtcgagggttgtttggcctgtaagagaacggcgattctcttgtaggagatgacggaggatcgtatgctgatgaggatgaggacgagggttgtggctgagattgatttgacctataccggggagtgggtgtctgggcactctgctctaggagatttgaacgcgcagatgaggcagacttttcataagagagataataaacatgagtgagcgacgttgaagcgagcctagtgagcaaagagaggtttactcacctgagcggccttttctagctttaacgcagcgaatcgatctctgagagctttgaaatcgttcttgaacttttctacacgtctgttctatccagagattcaacagagagatcacaagaagtatccaaagagaaaaaatgaaagaacatcagttccgtccaggtgtgacgattgaagaatcagtcagctccggaaaatccgaacatatcaagaaaatgatcttacgtcagggctttatcctttttagacgcgatgatctcctttttggccatggattcataatcatcgatcgttctagagagagccgctatcgaggctgtgatctgtcctgtagattcatacattcacaaagagaacgagaagagcgagaaggcaagtagaggaggcgaccaatacacatgtgaccaacaaataggttgagagatcagatctgtaagatagccgagtagacaggctagtagaccacctcgtatacatgcataccatttagggaggcagaggaatctagctcggactggagtttgtccagatcgttgttgagatttgcgaattgtttgagaccatgggtatagagtgagttcatcgtggtccaagggttgatcaactatcgacggtacaagtcaagaccatggatagaagaggtgtagcaatgagatcacgtgattgcctatgagccctgagcatgccatcaggctgacaccaaaaaattctgaaagccgttcaaattagcacaagaggatacattgagcctttggtgaatacctttctgatcagtactatatcaagccatgtcttaccagctaccaccaaacgctgctcccttggaggataacgacgactattcctcctcctctggatcggataccaccgagtgtgacaacttctcaaactgggcagaagatccggaggacgcttcggcgctcgccgtgcccttgttcggtcagcccggagagcaagttcagaacgttcaacaggccatggagatcgatcggtccaagggatttgatcttgagcgagaggtcgagagacttggttcgttgacccgtttagttatctggatagtacagcgcatcgttgtggagttttccagccgaggttgactaactcttctattaaattaggcttggattttcatcaacgtgttcgactgatcaaccatatcagaaagactgtatgttcttttcagtcagtgtcccgtgacagatagcatacgtagttaatccaactgctctattgtccgtatcatcacagaccccttccgtcgagactgttgccaaacttaccggaaccgagaagctcttccaagatgactcgcttttgatcccagtgttggagaatgacgcttacctccgtaagttctgtcgttcagcaacttctcttgtctctcagtatcgctgaccctattattatcaacctcaaatctgaaatgccttgcctgttctcagaggtcggtgactcatgggattcggactcagatgaagaccttgatgctccttctcagccccaatcttcctctgtaccaaactctcaaactccgaaagaatctgacgcagagcttcagaaggcgcgccgcaagattcgaagcctcgaggataagatcaaagctcttcaggcggaggcacaatacgaacttggatcgttaaagaacatcttgaaggaccgaatgaacgccagcaacggtgtcgaatccagagaagttgaggtcaaggacggtgctgaaggtgaagggaagaaggtgaatgaggaaggcaaaggaaaaggaaaggaaagagacgatgatagccactactttgatagctacgcttacaacggtacatcagcttttttctcgggcagtcatcctcaaacacagctcagcaaagtgttgactgatataccttctttctccacgtgtcctgtacagatatgtgtgtcatttgtctttcataaccaaatcagctcagaccgtcttggatggaatctctaagtttatattgacacagaaacgctttctttctttgtgttcatcgcttgcagccacgagatcatgcttaaaggtacattcacgtcggttttctgatctcagcgttgatagtgttgacatatacttgtccatccgttacagacacaacccgaacaaaatcctacgctattttcattctttctaaccctcatcttttcaaggacgccgtggtccttgtgagtttccatcttttcagtcgtgtaactatagattccttcaaagctcttatgttccaattgtttcatctgcttgtataggatgtcggatgtggaactggtatcctatccttgttcgccgctaaggctggcgcaaagcatgtttatgccgtagatgctagtgatgttgccaagtacgtatttctccttgtattctatatatgtgtgtgtttgaccatttacgcccgttttctgatcaaatttaggaaagcgatagaaaacatcaagaacaacggttatgctgacaagatcactgtcgttcgtggaaaggtcgaggatattcagctgcctgtcgaccacgtggatatcatcatttccgagtggatgggctacttcttgtccgtctctttatcccttctttaatttctatcatgaagttgatctttgaaacgctctttctgatcattcgacgtggtatttcttcaacaggctctatgagtccatgctcgattctgttttggttgctcgagatcgattccttcgaaagggtggtgtcctcgcgcccagtcagacgaagatcatgttggccggtgtggactgtgcagacttcatgaagcagcgagttgggttctgggaagatgtctatggtctgtagccaatttcctggaccgactgtgtagagagaggaaaaagactaatcttgttgctctgaggtctttcgtaaaataggatttgacatgaggacgatggcacaagagatgaatgaggactcattggtcgaaatcatggaggagtccgagttggtgacttcctgctcttgcatcaaggtttgtttctctcctcttgtctgatgcttctttttagcgtaccatcatcataccaagctcacattagatacccggaatgaaaaaaggacatcgtgatttcatcggcaacgatcaaatcgctcgactttacgtcacctttctctatcaccgcctcaagagacagcaccatgcacgccttcctcggttactttgatactttcttcactcctgatgggtcagcggtggatgaaagcgtagaggtggatcttttcagacacgatgaggaacttaaggttgaggcgaaagacggagagaagaacatagtctcattcaccacaggggtaagaaactgactccatgctgttatgttgaagtagacgttcatcattgacttgatgttttgccgatcatctagcctcaaggagtcccgacccactggaagcagactctctttatcctcaaagagccgatacgacttcagaaaggttagctttaacctcctttccttttcccatttgtccagaattgaatttcttttcctgaacaccacatactttccctctcctctgccttgctcatgacaggagcgaccattaccggaacattcctctgtcaaaaatcctatgatatcaacaaccgagagctcgatgtcgagatccattatcaaattacggagcctgatggttcagctcgggatgcttctggacgaacgaacgtccagcttttcaaggtcaggtagagcctcggctgattttgagaaaggagtaacagagagggagaatatgacattttttgaacaccgtgtgtctgtaggttctaaacatgcatggtacattcacgttgagtcgaactagatttttagaattagtgtgaaaggtctcttctaagaaaggatgcactcaaacttttggtcatgagagcaagtaaaagaagcaagtgagcacgacatccatacgacaatcagaattgtcccacctttcgcgcaagccggaggagagaaacctctgatttctctatcaactcctgttccgattcctctccacaccatcttgttcgagacaaacataaggacacgacttctggcgctttctggatgtaggcgaacggcgttgcacatctgctgaacccggatgaccttctcgagaatgtggcgccggatgaacgaagcaccgctcttcggccgatcacacgttcttgtaggtcaacatttcatccattttctttgccatgattctctgtggtgacccttttctccacttgaacctaaggagcaccttgttaaacccattaatgtgaccctatactgatttgtaacagacgcatttagagaatttctgaagcgaatacacgcaaagtgttatttgtgatctgggcagtcggctgccgatcttttcatcagccgtttccggcccaacctaaattgaactgactgaacggataacaaataacggacctccgtgtccttttgatcgtctctgatgcattccattatcatcctatcccgttggggagtcttcttggttttttcttcctgattctgaaatttttcggttcttcattctataaaagcgctctgtctccggtgcaatccaattcttactcgttcttcagcccatcgcatctctcacaaacttcacttcaaccttcctgttctcacttttcaacccaacatctaatctctcatcatgtccactgataaagtcactttcctcctcaactggaaggccaccgcctatcatcttcccatcttcatggctcaggccaatgggtacttcaaagatgagggcgtcaaggtcgccatcttggagcccaagtgagtagtcgtttgtgcttgtgatacactgtcataggctgatcaaacattaaaatcttctacgtcgtctttagcgacccttccgatgttactgagttgattggagcgggtaacgccaaccttggcgttaagggtcagtctatcaatgtacttcttttctcatccaagaccaaactgatcccagacatgttattccacagctctcatccatactattgctggaaagtctcgaggcttccccatcaagtcattgggaacgctgatggatgaacccttcactggtgttctctacctcaaggtgtgttctttaagtttcttctccctctttgtttgtgactcataagccttttcctttccttcaagcaaaacggcttgactgaggatttccaaactctcaagggcaagaggattggttatgtcggagaattcggaaaaatccaaatcgatgagatcaccgctgcctacggatggggccctgaagactacacccccgtccgatgtggtatggccatcgctgagaaccttatttcgggcaacatcgatgccggagtcggtcttgaaaacagtacctttgtctcctcaatcaactcatcaaggtctattctcacagccgtcaactaactggacattttgctttgcttgcaatgaatctttatctggggacctctcagtccagcaggtcgaggtacgatagatatctctccttgactggtcacctcttcctcgaagcacaaaaagtttttttttgcacgcgcgcgcatgtgaaaagtcagcgggcccatctttgtagcaccacgctatcttactagtaggctcctcttcccagggcattcccctgaagcagcgagtgccttcgaagccgccggttcttctttcatctcacattcttcgctttactgagaatgatgtgaggtgttttgagaatctggcttgatgctcggagtgctgagattacatcgcctgaacttgaccacgtgaccgcgtggctaagaatgctttagaggaagccagtcttctacccctcccccttccgtccgtactcactattgtccttttcatcaaaattctcctacttcgtccatcttctttacagttagagcaatggttgatctcccagggacgacctatcaccgatgtcggtatgcagtaagtttccatctcaagattcactttgtagaggttgccgaaatctgagacttaactttgactcgctctatcttcattattcaagccgaattgacaagcttgccaaccccgctcttggatgctgctgcttctgctcggtatgttcagcctatgacagggttttttcaagttttactttgacactgactgcttcgctttttgatttctgcagatcttgctcattggtaatgagaactggatcgacgctcatcctaaagaaaccgctgcagtcatgaaggccatcaagcgtggaacagacttcatgttggccaatccggttgccgcctggaagcgatatgtcgaattcaaggtgattccgaatacgctcttttcaaacactccgagatgtgagctgacacatttgtgactcttatttcatatccagcctgttatgaacacccgaatcaacgcgcttcaatatgataggtctttcaactatatgagcagggaccttgcaaacgtttctcgagactggaacaaggtacgtttaatcaaattcgcccttgagtacgatgtttattgattctcttctgttcgacggctttactcccaggtcactggatacgccaagcgactcgggatcgtccctaatgatttcaagcagaactacaccaatgagttccttgtttggcccctcgagaaagaggccgaagacggagaaatcaaacagtcggttttcttccctctactccaatctgtggatggcaaaatatagactcatatatgtaaattgatggttttctacggtacccaggcaagaaatcacggccatccaaaaagagatttctcagaccggtggtcttcttttcaaagccaacgaaatcgctgctactgcctaagcatctttaaatagtttgcttcttctatagaaagatacatacttcctttcaaatatcttctcctctttcgatcgttagcatggtgatgtgaatgattcaaacggtgttatgtgtctcagagagaaaggagctgaatgtacaaaagatacaacaagattgttttcggagattatgatctttgggcggaggagccttaacgtctgaacttctctccgttattgtttgcgcacagagacttcaccaaccctggcgctccgtcgctcactcgctaaattcttcgatttgtaggtccgcctcaccctctctactagccatcttccaacccttctactctacactcgctaacctggattggaagaataaatttgtgtcaagaaaaagaaagcaaaatgagaaacacgtctccttctgaccggaataatatcttctttacatcgatcgttcagcaaaatctctcactctagacaacacatctgccaccgatgactcaacaatatcgttcgcttgatctgcatatgctccggtcaagtttagtgtaggtttcgtttctatttttcctcggctttgttcaaatgtgtccgggattgatgctcattttcaaccgtgaataacactacagatgcgaactatgactagaatatacttatgtcgtcagcgagaaccatcactgtcttgtatcgactccacagcagtaagtcaaattgggctttgtatcaatattatgagcgcatattgactctatcgtgcacgcgcgcttaacatctcactcagctcttcatctgtgtcaagcaatcagatctcggtgtagatccttgatgcataaaatcccgtctgaagggttcatcaaattatgtgattgagttggtaggctcttcttgaccttgacgaccgaatgggactctgcttgtggtggatagcgcaacaagatattgacgtttttatctctctcatcatctacttatcaggttttgacttttgccccagtattcatcgtcatcagatgctatgtaatccctggaatccacataacaagatgctactgccgacactgctggctgcacctcaagacgtacactttcctgtttcatacattccgaggacccggtcttattatcattaaaaagattgtttcaaatctgaccgacctattgtaatacatgagtctctcatttgatgactattgacatcgtcttttcatatccgttctgtttataatctatgtctcatcgaattcacctatatttgagactgacttttggaatgaataccgcgctctctattatctatcgatcgacagcttgcattacacgaattagagggaggggggggggaatgttgtttctgtcaatatctaccaggacgcagacaatgagatttgttcggtctccacattcatgtatcgcccggtttggagttaatcctttcttcacagtgcttagctctatatacttccaatcgtaaggcccgggttatagttggtggagtcatcctcaatcggataaatcattcttttccatgcgtcatctttgagatatctagcttcatcttgaaatacctgctcactgctgtatgcttattccaagatcgatcttctatctgtttgttcctcttctgagaacattttgtttgatctatgatacataaccttgataaaatgtgagaatccttgttattctcattaccaatcagcatctgcttatgatcatcccagattttacatctatatgcatataaatggtgaatcgggaaaaaaatagaaagaaaaaagaattgaaacctggagttaaagatcgccgcgttctagaaaagatgaacagaaagaggatgtagggcgtcgcgagtttacattgatattgacatgatgatgtgttaatcaaaagagtatgaagatgatgatgtgatatgtctcgaccaattaagtattaaaagaacgccaacgaattaagatgtcacgcagtataagtacacgtgtattcatgaggagaatagagaaatacagactggtggagtaatgaaagagtatgtgatagcactggctgtagatgcggaacgtgatgaagatacaaacatatgcttgtccaaaacgataagatgacagagagattttacataaacatgttttctgtgaaaagcgtcagaatgaacaaatcagtttgtcatcttgaatacaagaaagcacatatggtagacgaaatagactaagacgtacctgcgagcttgcgttcttcctatataatattccagcgcgtacattcctcatacacaaatcaactactgactctgtattgaagaagaagaagaggaggaatctcttacctcgttctcgattgcattcgctctagcagcgatctgtccacctgtgtggactattggactaactgcttccctgagtggctcttggtggattcgacgctgatgatccagatgaactggaagaggagatgagccagatggatcgttcgtattagccacaccagcactagaaagttcatgaccccctctatgggttgatgaaaagtgggtgtgaccaggtgaaggcttcggatagacaggagtggtaggcgtgaagttacgcagggcgccggtaggaggcggtcggtcttgctttgtctaaccaaataaaatcatgacgatagttagcaagttcagagagacagacttgtgagcaaagaaaaagataagagaacatcaagcaaagaacgaatcaacgaacccctttccgtgtagccgcctttcctaaagccccgatgacgcctagcttcttcacgccttttttccagatatcctgagtgttgtattctttcggcatcggtcgagacaggacctcataaggatcggccggggcgggttcgtttcgaacatgagtggatgcgtatttcggttcttcatttgactgatggccagagaagataagtgaagaagtcgggggtggctgaggcaaatcctttgatttctcgcgctgaggttgtcgccgatgctgatgctgatgttgatgttgcggtgactgctgttgttgagttagttgatgttggtattgctgttgctgtcgggattgagcttgaggtgctagcgattcatcgtcctcatcactgtcatatagctcttcgaccacaactcccctttctctccccttctcgctgtgtatcgttggatcgaagttagcccgaactctttcgtcactcatcctctttttcaaatcatcggctggttgcgaactcgatatatcttttgtgggaatcatcaacttgggtggtggctgtttagacaaccagctgtttgatgagtgagtcgaggacatatgctgatgttgaggtcgcacaatcgaccgtgaaggtgaaggggagagttgatcaggactcatcaaaaggttataacccttcgtctcaggtaaggtggaatcttccagcatcggcggcgtaggaaggctagaggaaacagtcgagtgcggagagcctgacgggttggtctcagacggattttcaggattttcagagaggaccgtgtgatttttttcggcttgcgctttctgcggcgtaaaggagttgaagtcttcaaacgatccctcaggatggatagtgacctgggactgatttggacccctcggtgacggttggttagcaggtccactgggtgaagaaagcgatccagaagagtcttcgacaaacaaccctgtggcctccttttcaaacggccttcttgtttcttctatgatgttgcttttgttagcaacatcctgttctgttgatcgttgggtgcacaaggacttctgtccaggatctataactggggataccgcatccggcacatcacccaaaatgctgctcgcgatagaccctcggatactataaacatctccgtagtaggacgatgctgatacaggcaagagaggtgacagtgcctgatcagctggaggatagatatgcgtgttcaaggtgaggggtgaagatgatgaagatccatgagattcgggcgagccgtaaatgatgcctcctgagaagatgatgttccgttgtgtaggcagaagtgttaattgaagacatctaagcctaagtggacttcatcgacacagggatataagcagacaaatgaaacttacgttcttgcatttcgttctccactatcttcagtgatcttccgtttttttcgaactcgaacagtctaccatctatgatgacccttctcctcatctcaccctctttaaaccctttttccaagaaggataaataatgaccatcaatatctcttccgctgtatgatgggcctcgttcgctcgagcccgccggcgcagattcgctgaacgatctggagattggccttctttctgacgaagaaacagtctgttgctgcactctagaggctccgtgtgatccttctgacggaacggaaggtgccttcaaagatggactgacagccacctcttgagcggatctagtccctaaccagctgtaccgttctgagttgggtgactctctcgacgggttgttttgataggatgaggccgaggccgaggaacataccgaacgtctaccggacacatcctgagatcctatgtagtcgccagaccgaacttgtgtagaactgctagggccgagaagttgtctagctaatgttcgccttcgttgaagtgtatctgggttgattttagcatttgtcgtgcccatccggtgagaagatgatctgtcatgagcggcttcaggacgttgatgctgaattggcggctgaagatcttgagaagtggatgattttattcgggtgttggaaaaatctggtgtcccagaaacagatggttttttccacgcggagaagaacgaggagtttgcattcgaatgaccatgtctagggcttagttcatcggaggaagagtgtcctccaataggggtgagcgacatcgcagtatctagggaagccgatcgagagatatgcatggacgtctcaatggacgacagcccgaaacgcgcagtgttagtggtcgatggtgaagaggcgacaatgtgagagtgaggccgaggcctgatagaagtattcattgaagaggaaggcgaggagacttgaggagatgaggatacttgacccgatgcctgattcagaaccgaagcttcagatatgttgcttgactgagagggcttgagaggggctgatattatgttagggcccaatgatctggatcaacggagcacaaatagaaggaaggagcagtcagtgaacgagacaagaggaagactgagaacgatacgatggatattgaatgacaagaaggtataaagatgaggataaagtttgagagggatggaagagtgaggagagggaaggtaaggtaacgtgtatgcatccctgtaccagcatacatcgtccgttaattcctttccacctgaccaaccgaccgagctagttggctgtgtgccaacaaacaccgtccactacgttcaattgttttccaattgttttctctatgtgatatgcgacttcgatggacttacatatcgacgtcagaagatatcggaaattgtccagaaacgaccggacgggtctggttttgtccaccaacctgattattgtctggcagcctgccgacatcgacacgtccgttcacactttcagccgctaaccaagaacccagccaggccagatcttccgtcatgatcgataaggtagtaatctaaagagtaagtgagatagaacgccgagtataacaaactatgttcaacgcgacatcaggtacagatggagtcaacgagaaatcctatcagacggaagggtcggggatacacacccacgaatgacggcctttcagtgagaggcttcttatggtacttgactgtcaagcctggcgccttgttcgggaaaacctctttgaagctgttcaaaacggagtggtgcaagaagaccttttggctctagccgtccttgtcaagcagctgcttgcttttgtctgcccaatcttatatgatgtgctattcgaacttgtttgtcactcgcctcgaaggtggtcaatgattcaacatctatgtcacgtgatatattcgggccagtccgcttttgttcttgttttctttattcgctttgtctgttctttgtgtcgatagcatcaagtgtgacaaagggcaacatgttatggggggatgatcccaatctctttcagttctccccagagtgcgctcttcaccggctcgatagccgcctgcctctccgagccttctccccaacatacgcccagcacaacgtttgcccagctcaaaaacatgtaagctcgagcaagatgcctcagtccagtcggatctctcacaggaagaaggatagatagattgagagagatcgaggcctgagacagcaagtgagtgccttacgaagaagaaagatataaaaacagttcaggatacgtccagcgacacagagtagaacatcacgactgcaagacccaccaatcaatggccaaaagggtccatagccaagccaataaacctttagaactgcttcgcccaatttctcagcctcactccatctgccttcatgatgtgcgtcttcgaacctttttgtcaaatttgcaatctccttctctggtattcttcctataaattggccttcaggtcgagggatgtccggatatgctgtaggtttagcggacgcacgaggaagggccgggttcgagggaatcactactggcggaggtaaaggacttgaggcaggaggatcagcagatgagcagcatagcgagcatacgcagtcaaagtagtagattgttttgagagtttctcgtcgggttttgagagacgtcaatgggtctagatagctaatagtgacctttccaatgatgacacaaagtatacccataatgaaggtaagctagatgatttgtagatccggaaagaagctcgattcgaaacaggaagccatcagcgaagtaagcaacgaacctcttctccttctttcaacgctctcaacgttctcaatccgactatcagaccatcagctccccatgagcagctgacagcagcactgggcgcgcatgaatgattcaccgctctgctgatcggagctagtacggcatgagcaaagggttccaacttcatgtccggggtcgacaacacatgattgtttcgttgaaagcgggaaagtagactcgataaaatatcaggagtaaggtgggaaggtagaaaaggagggagaagctctggtagaagggatgaagaaggtgtaggtgttgatagtagagagaggaacgtttctgacggcgaagacgatagagaactagcatgtgccttcgtcagattcggcaaggaagcttcgttgatgttgctgaagtactgaactgctagcttgcacaacaagagaccatccgttcgctctgactcgttcatttggaccgatagaagtgcatgtcgaattcgtggaaggaccttgcaaagtatcttatgatgattcaaccaagctttctgttggcctggttgagagggccatcacatcaatctcgactcagcattccagatgattcaaaggtagaaagtgagcagagaaaggggctgaaacttacatgaagagtcacagtacacatcctctctacacattctacattctatcggacgagtaccaagcacctgaagacattcgtcacaacgaactcttttaaacgagtcgagtagcacagtcacagtcggtggaccggctatgagaagacttgctccaggattaggcaaagaccgggatgtgatacattttgatcgagcatgggaagagtcgaccagcttgatagcatccatcctagtaagactgatgatcttatatcagagttgatcattaatgtgtcatcaattaaataggagtccagggtcttgattatgtaattaccgcgtcgcgacgcgttcatcgcttgcttaatgacacgcgtcaaacatcttggaaccatcatacagtacccacacatatatactaagtatgcagagcacaatcttcaaagtaagaatcttcatttgcgcacatgcttagtgatcaagcgtctaggatataatgctgacaattggattgccatggcctcatctagatctttacaacaaagcactctctgacgctaccatcccaggtactcggctttgttgaaaagattctaatcgagcatgaggtcgaacgagatatgtgggcagattcatgtgatcatctggcaagagagtatatgaggggagagggtaagtgtgaagtttatgttcgaagagaattttgatgttgtagaaaagatatagaatcttatgccatcggttccatttagacccgtcgcctctggtcactttgaaggggatcgagcaggcctaccaggcacttcagctcaaggtttgttctctttcacctgctctgatcgggctcgatggttcaagtagttaatgactcccttggtggattgaacctgtcatagacggacatcaatgaagagaatgatccgtacgttcagatataccctcaactttatcatctgggtactagacggggactatatggatctcagatttcaaattgctcctctcgttcctcttcctcagcctagcagaatcgacggacgaagtaaatgtggagaatcacttcaaagttatcgattcatacaagatgccaggtctacgttttgatagcaaccgaggtgtttggtcggtgtgagtacatacgctttcttttgcttgtttatcgagtacttcctctcgtttccagctagttcaactagttttctgaatttggtcttctcagagctccccataaacccagtatagcggctccgccactttcaaaggcatcgttcttgagggaaagatgcgctttaatccgacaggttcgctatttttcgtcatttgttgtgagttccttgtgagtatcaaaaagagtagagttgacacaactcggtgaggacatcagattgttcttcgttccgaacacttcaccccaccagtactaggaggaagagacaaggatgaatacatgaaagttagtgattcaaactacttcggaagtttagaggaggcgctaactatagacatgcatcaacgctgggcaacaaatagttgaactcaataaaaaacctactaggtcggccgaatcagaggttcctccttctgggcatccttggtcgtacaattgagggagagctctgcttagaagatggagacggaaaagtgaccttagatatggatgaagctgtaaggatacgcatgcttgacatcagattattcttgtgcgcatatatctgatcagaattgcggaggctgtcgtcattcatactgttttgttcgaaaacatgtatagacaccaggagaaggactgttcaccgagggctgtgttgttctggtcgaaggcgaatacacggacgaagagaggatgagggtaattgaaatggggcatcctccaagtgaaaaacgggcggtcgctaggtgcgtaatccctcatttgccactccctttcgttgattcatctctgattcagatataaattctgtgtctctcgctcaaatctgcattttactgccatcagatctttgtacggtcatgtagatttcttaggggtaggagctacctctcagaaagacgaggtacgtaccacttgtctctatcgcgttatgattttttcccttttcacagcctgactgttcgaattacatcttatatgctcactggtccatctatacatacacacacaggatcgatttgctccactcatcgctgccaactcacatatctcattcgtgatcgtgtcagacctgtggctcgaccatcccaagacgttttctaacctgcgccggatgtttgaagtttacgcagggtcgacattccgaccgttggcatttatattttgtggaaatttctcgagttcgagttgtatcgtcggtggggcgagtggactagcaaaatacactggttggttttgatctcgatcctcttgatcataagctttcagaacattgttctaaatcatcttgatctgtacttcttcagaaaacttcaatcagctagccaacttattgtcttcgttcccggatctcgctcaaacttctcactttattttcgtacccggcccactcgatccctgggggtctactacattacctcgtccgcctattcctgatacgttcgtcgctcgtgtcaaggcccggctgccaaaggcgcaatttatgagcaacccgtgcaggatcaaatactttgaccaggagatcgttatctgtagagaggatctaatgggccggatgttgagaaatctagagggtgtcaaggaaggtgtcaaggaaggggcggatatgaagaaatatgtgcgctctttcttttctggtcgtactttttacatatcatctctcgctcatcttcttttcattgaatcagcttgtacaaacgattctagaccagtgtcatctctcacctctgcctctctcggtccgaccaacattatgggactttgaccacgccttacgtttatacccaatgcctactagtgtccgtcttttcatctgtattgatacccaaagggataatcgtttgtgctgatataccttacccggtcaaattggacgtgtaccttcatcatatctgtttggttgcgcagcttatattggcagacaaatacgaacgatatgagttgacatatgagggatgccatgtattcaacccaggcagcttcattggaaactcatttgaatggtcaacttactatccgtctacgcagcgctcggagagaaggtacgtgttgttccttggtcttcttgtgctttgtggcctagtgaagacgatgggatccttacctgcaatgttctcctcttatctcttcattgctgtagtgtgttatctgaagattcatgagcctttgtactttaacttttgtcgattcatttttctaatgtgatctacattttgaagtctgctgttatcgatctgatcaaaataaagcgatcggcaatactgttgtaaccctaaagatctagaatttatagatgacgtaagctgtggttgtatacgtcattgcccctctggggctcctactcatatcctattcgaatctactcaacctcttccttctctggaggtttccatctcttttttttcgtggtcttcgatgttcttataaagattgatgcttcctaacatcgtacgaaaactctctttcttccctcgaaccctttgcctatctcaggtcacaaaaaaaattattcagcctttccctagacccatcatcactaaacttttcaattcctctcctccactcaaaagtatgagctcgcttatgtccacctcgtttccatctcacaattttctggcagaaatattttcactaatctcacctttctctgtgtgcatgattgaaaaatctacccaaaccagtgccctcttacgacgacgttgaagttatcaccgcctatgaggccaatttgcctaccaaagcattcgagcaggatggagctggtctcgactcggagatgccagttttggcagagcacacgaagctcgaggcttgggatgagaacggaaaaccctacttgaaggagtatgagggtgctggtaaactgaaaggaaagattgccttattgactggagcggattctgtaagtagtcacacatcatttgaagtgatacgacgattgactactgacgcaaatgatacatctttggggacaccatattagggtatcggccgatctgctgctatcatgcttgctcgagagggggcctcaatttctatcgttgccctttctgaagagaaaaaagagtgcgttccctaagagagaggttttttctaaatttgtgcgccaagcgcttactcatctactcctccaactttctcttacttgattaatttagtgctgaggaggtcaaagctatgatcgaaggcagcaagtattctcctcaatccaaggtgaacatcatctacgccgatttgtccaagaaaggggacggagaagccaaacgaatccttgaagagcacactgctgtgtatggtcaacggttggacgtacttgtgaacaacgctgctcaacaagtcacacagaaggatttgacaaaaatcgacatggacgtcgtcgagagaacattccagtgcgtgtcttccgttcttattctcaatgatttggtcgtcagtttaattctctaatccatcatctcacccgtttcctgatattcggaattcaggatcaacatcatcgccatgttcgccatcactaaagccgctcttcctcttatgaagcgaggatcggccatcatcaacaccacctccgtcaccgcctacaaaggatctggaggtttcatggattgtatgtctttttgtatcacccttatacaccaaccatctactgatatgtgacattacttctgtcgtcttatttccagacgccgctacaaagggtgccatcgttgccttcactcgatctctatccgttcagctttcccctaagggtatccgagccaacgccgttgtatgccttttcttcttcgttcatcgtcattgtctatcatatccgtttcccagttcctaacgcttgcttgcatactttgacttctgattgacaggcccctggcccgatatacactcctctccaaccagcagcccgaccgggcgatgagatcgacggatttggtgcaggcgctgtcccactacacagccgagccggtcaaccggcagagtgcggaccgacttatgtctacttggcttccgctgatgctaactgtacgtggcccccttcttgacactccacttaatgacaggatgtacactaggatgaatagctgatctttctctgcctctttccttcttgcctcttctcctgctatatgtgctatctcgaatatttagacgtgaccggtcaaggttagtcaaactttcttctctccttcagactattaaattgaatacgcaattgaacatttacctcttcgtcttatacattcttagttcttcacgtgaatggtggaatgctctgcccgtcgtagacgactgttttttatttggttgaatttctattcccttgtcggttgaaactactgtagctctgttccatgtcttcatctttgccctagtcctccgattgataactcccttttgttcgacgtgtattgcttggtctttgaaatttaaggatgaagagagagaataggaagagaacaaagtctgaaacagtgaaattgtcctggcagaaatgatattggtaacgctaacgattatgtataaagaaaaaacagagggaaagcgagagacaggaaatctggcccaaaaagagaaagaatgaaaacagacagattctactacagaaacagaagcaagcgagagctgcgagagaagaaagaagaggaatagaaaaggccacgtgtaaagaaaacaaagaaagaatcaagatgtatgcaaattgtgatgagtttactcgacggtcaccgacttggccaagtttctcgggaagctagtgattgacatggatagcagaagtgagtttagtctgacatcagacaaccacatgaagaaaggaattgaaagacgtactcgacatcgactccgcccataacggccaagtggtatgagagaagctggagaggaataacgttgatgagaccctgaagacagtccacagtgttgggcactcgaatcaatctgtcttcagaggagaaactgctgtcgttatcgttgcaaatcacgactaaaaggagatcacgacgaagggatatcagaaagaggaattaggaagagaagaagctattgaaaaattgactgaagaaactcactaggctgtccctttcgagccttgacctgctgaagagcgctctgcaccttagggtacaaactatcctgagtcatgataagaatgacactgtgatgatattgacaaagcaactaggtaatcagttggtgctcgaaatagccgtttgacatgtacaagttcacaacaaaaatactaacggaaggtgctcatcaatgagcgcgagaggtccgtgcttgagctctccggccaaaatctgaacaaccgcaaaagataagttcgttgggtcagcactactacacctgtagatcatagatgttagacaaagacaagggaacatacaccctcgcaatggcagtaagcaacctctttaatcttcaacgctccctccaaacaggtcgcgaacctagtgttaattcgagatcaagattagtaaggtcagcgaagttggaatctttcttggctagcgcgggacaaggaagcaagccggaacgcgatacgtactgatatcctcggcccatgatcaacaagctcttctccttggccaaggtatccctggcgagctgctggagctccttgtcctgcttaaggacccttgagatctgagcaggaaggtcgtgaagaccatcgatgatggactgtcgtcgttcgagcttggacaatcggtcatctgagaactggacagccatcatgaccaaagcaatgtactgagaggtatacgccttggtagaggcaacaccaatttcgggaccagcgttgatgtgaacaccacagtgagattctctggagatggtagatccgacagtgtttacgacaccaaggcagagagcacctcgctcgaggcaatatcgcatggccagaatagtatcagccgtctcgccggactgagagacaaagacacaaacatcgtccctgaagatggggcactttcggtccaaaaagtcggaagcaagctcgatgctgacaggaacctcagtcaactcctcaaagatcgttcgagtagcgacacatgagtggtaactagttccacaagcgatgaaacacattcgtctgcaccttcggatgacgttaaggtagctcttcagtcctcccaagttgactgtcctggtatcaaagttgattcgacctcgcatggtgttgaccacagactcgggctgctcgtagatttccttctgcatgaagtgatcgaactgacccttcatgatctcggcaagctcgatctcgagtgtctcgatagctcgaacggaagaaagaccgtcatctcttcggagtcgatgaatgtggagttcttcgtgatggggaaaggggttgaaagatcagtcactaggcctcgaaaacgtgtcaacacgaagagttatcagacgtacctccgtcggcgatgtgagcaatgtcatcatcttcaaggtataagaccttcttagtgtgctcgacaacggccgaagcatcggaagcgacgaagtactcgatgggctggggcataccgtcctcagacaagaacgccctggactgagttcgtcgcatcttggagttgggtccagtaggaggaggggcaaggaaggaggcgtcggtggcaggggctgagcaaaaagcgatatttgaaccaatgattagaagcctatccgagcgcgtacagtggctcacatctgtgatagatgtactcactgagctctaaggccttctcctggtcagcagccatctcaacatcgacaaagtctaccttgagcttcttgtcagtcttgacaccgatcaaaagaggagatcctcgacgagcaatcacaatctcggacgggaagtggcaggacttgaaagcaaaagcaaacgagccctcctatggtttacacaacagccattcgcgcacagtccgaattagtaaccgtgcgcatgccagtcaagtgtcatattaaactggtgaagtacgtacgagctctttgatgacagccttaataagagtggtaaaggtcaatcgcttagtgggctgggaatcatagatgtacttgcaaaggacggcgacggcttcggtatcggtttcggtctcgaagtggtatcctcgcttctccaaaaccatcttaagctccttgtctgtttgcgaatgaaagttgatcaaggtaagagatcacgctgaggatgaagcctacaaacagtcacaatatacgcacagttggtgatgataccgtctaaggaaagcagagaaaatatatcagtcctgcattcttctcgaatgtaccaagacgttgtcgataaagacaagagacgtactgtggacaacgatgaactcttgggaggcaccacttctgtgggggtggcagttcgtaggagagggagatccgtgagtagcccatcgagtgtgagatatcgaggtttgggagacgaaagtcttggtgaagtccgcagtggattggtcgatcagttttcgaagcgaggcaacctttccgacctccttgtagagcctagttgagtgttgaagagatgagtcagtgaacagatggggccgttgtgcctgaaatgcccccaggagatttcacataaagcgtgcgaacaaaactcacaagaagtcgtcgttgtctccgtcgattccaatacctgttgtaaggagaaatgagtatcgtcaatgttctgatgatgcgatcgttcggaggaccagatgcaaggcaagggagaaagaataaagtgcaacataccagcactatcgtaacctcggtattcgagccttgaaagacccttggtcaaaatatcggcgatctgctttcggtcctgtttgatatggtgatttttccgaaagagaatgctgtcagatcggtaaagggtaatgtgtgcatctatacaaggtgaatttacataccttctcaacgaggtacgagcagtaggcaaagattccactgcatcaaggcatgcaaccgggttcagtttatttttgagttccttgacttttttcttgccttgggcgatcaagcacaaggtattggtgaggagatcgagaagaaaggacgacggagcttaccacattagagcagaggggtaaagattagaggggtaatggaaagcggaaaagaacgggtaatgctgtgtctgaagaggggtgttcaaggataagagaaagagcaaaagcgatgaaagcagacgaggtgcttgaaatcaaaggtgaagaattccgagagtctgtatgagctgaaattcgtttcccgataaccaacggccaattcgaagcatatcacaacggccagggaagggagaaaacgagagtgaaaaacagcagagatgtcagaatcaagtttagatgtcgaaagcccaaagatttgtcgaggtcgagaaaagtagccgggtgagcagacagatgtgttcctggagagatctgttttgatttctgacgataactgagccaccgagtctgttctgctggtctctccttgtattctctcttggcctatgttgaagatgatgtgaagacaaagaggagaagagatagaaaaggaaacagagagggactcacgccaggaacaacaagaaagagagagtgtgtgtgtatgtgagagaaagaaaggagagaaggaagggaggatgagaaagaaagcgaagggaagggaagggaaagcaaaagaaaggcggaagggcgtgtttgttcgatgtgcacaggaatgccgcgtaaccaagatagcgccgctcagtcatctttaaggggggtgacgaactcttgactgtgcctgtgcgagagtttgttggatgccggtcttgccttgccttgactcgtatgctctcttttgctgtatctttattgattcgccttcaatcttttgagttgtgcatatctgactcatggttgttgtgctggacacccatgcgcgctcgatcgttcttatccgaaggaagtgaggaggcagcatgatccttataaacatgatgtgtatatcacgtcgtgcgtttagttttttgttgttattttcctctgctatttccttccttttcattattctgaaacctggcttcggacaaatgtttgatttgagatatctttcggcagggattggttatgcgatttggttacagccacgtggccagtgacatatcatactgctgtgtcgtccctctcgcgtcccctgacgacacacaggcagccgagttcttccatctcgacagattccattctactggtcaattctcgagtttcatcgtcatctcgtcccatccattagcctagtaaagctgaagctctgaaagtggggatcataaacctcaatatggatcccgagagtcctccctcaaacctttacttgactcctctccttccagatcttgagccatggctttcttctcctgaacagacctctcggccaaatccaccggcttccaacttgcttcacccggcttcgtctgcagcggcctttctctcaaacgcacgcgcgggtaactcgatcttcaatctgctgccaggtggaaaggtcactcctcctttgtcttcatcgccaaagaacggtccaagccaatcagaacccagtggatcaatagacggagacagagtcaagaaggtcaagtgcaaatgggtcgaagggtacagtgagttcaacgatcttgacccgtatgccgtgccagtggatcgactggtctttggtctgttctcattatgttttactctttccctttctaatccttatttgttcaagacaacaatctttacatcggtacatcggacggacaagtcctttggtatacctactcgacaaccgaaacttccatcgtaagcaacgttcaagtgtcttgagttcaaagctcagccatctgactatgtattgttcgtgtccttcaggatccttatacccttcgccataagcattctatctttcctcgccggccaatagataggatctatctcttgccgtccatatctaaggcgctcatactgtctggtatgctttaactcgcgacctctacgtacacttcagatcgaacactgatccacttgacctgtagaatcaacactacacttcgttacgcttccgagcttggaaccagtccttccagctcttattcaacccatcagaggagtcgtggccgtatccgtggatgaaggccatgagtattactcggccgatggagtggacgaggtagggctttgtgtggtcaagcggaaagtgatctcggttttgagactgggaaccaggttgttccatgtcaaagtgagcccgcatactttgatatgtctagttgtttcgtcatgagtatctctggtgctaaatggccatctgcataatggtcttgtcaggaaatacctataccagaacccgccgtcctcacccgatactattctccaacactttgtcaagccgattcaaccaactattcactcgtctctatcaatgagagtacctctcttcccatcttaccactctgccaagcatctgcagaaggtcttgcgttcaagccaaagcccaacattgcaattgtacaggaggatgaattcctcatgacgagtctcatcaactcaaataatcttggtgccacgatcggattgtttgtcaatggcaacggggatccagtgagaggcgcgattgagtgggatggaagtccgagaagcttaggtccgtattttccttctcctcgttcttagacatcatgatctatcttttcttttctatggttgagtccctcgaacgagagatgcatgactcataccaatccctactcttcttatccaataataacaatcatcagtcgtcaacccaccttatgttatttccttgcttcgtaatcgtacgattcaagtacactctttgatctctcttgaactcatccaaacgatccctttaccgcccaacatggatgcccgtgttctcaccaaatctcctcagggcttcaacgtgccatcgaccgagcgggatacacttcttcggaagatgcctattcctcttcttcaatcaggacctccgagcaatttgacgaaagcttcttccaacaaatcctcttccgatgctggtgccaacgatgacgtagaagaggatgacaaagaaacagattccaatgtgtttccgacagagatcaatcactttgatcctccttccggatcaggtctaactcctccgtcctctccccctgctcagccagccggtcgatcatctttccaacactctactcgttcatctgtttcctcgtattacaatcctggactatctagcacgcctcagctatccaacgtctttgtactgtcctctacatcgatatacgctctcacaccaacaccgccacttttagcagctctagatacgctgacttcatctgctatcgttggatctggcgatataagaaagtcaggtggagggctgacagaagcgctgacgccactgttaatggacgcttcttttagagaaggaggtcaacaagacatagaggcagtccagttcatacaccataaagtgtttctcaaaggcttgagggaagctagatttggaagagttggagagagcgatgcaaagatcaaggaggacccaactggggatgcagaggcagatgatgatcagtcacaaccagagaaccgacctaaagtggacgtcgccaaagatggagaaggagaaggggaacaagcagagatgtggctgtttggagggggagacgtccgattgatcatcaggctctttgcagatctcagaagggttttggagagagagaacattggggatgtctgggtggaggacggtctggttgaagagtgggaaaaactctgggatatcgaagaaatcagtgcgttcttctttagattttgatctcatctgccttgggccccattgctaacaacatcctttactcactatggtcactctcacacgtacttaagttcaaactcacctaaagaggatatatgaccctcacatacatccgaacgtagcaagctctccatcaactcttgagctccacaagatcctactcaaccaggctcgacatatgctgcggttaattctggaaagagaacgggaaggaaggtctcgtcgacatacagggcgtaagcagatgggagtcagggatgaggaacgtaacggcgaggatgatgcgttgaacagggtccgtgtcggtcaatcctttatgatctattccttcaggagaaaacactaatctcgcgctttccctatcttctcttcaactccttcttctcacagattgtggatacgtcgttgttgatcctactctcacgaataggctcaacatcttctatccttgatattcttgatcggcctcattcggcctcgatggatcttgttcgttcgagtttggagatgcattctcgctggtttgcacttggcagatgtagtccaacatctgttgaaagctccttagagatgttcgctgcgtacgtcatctaacctttcttcatcataatcatcccatgtatgaacgttgcactgatgaattaactggaacgtcccgggagaacctgataggttggtggaaggtacaaaggttgatgaagactgtcctcgagacccgatgaacgagatcctctcgttgctggctcaaagtgaagacattccgctagttcgaaaatggggcctgtgggttgttgctagagatcccgaacgaggtctctcggtacgtttctttttcttccctgcccttctgtttcagacttccttcctttgtcactttccatttgaatttcttgttaactatgaagtctgttctgtcctgttctgtagctattcattcattcagggttaaactttgatcactcagacttggtggacgaacttcggcaattacaaccagaagctggagacaagtatttgcagcatgtggtgatcaatcgaaacagcttggtttgttcataaccatcctttggctctaatcctgaattctgatgaccgaattgctttcttactttgcctttgacttactttttgcatatcgttcctcacctgtccggtctaacaccgtgacaggataagaatttgcatacatcactggcatcccgttatttggagcgaactcgtcaagagcttgagaatgggcaaaccaagaagttcttcgataacgcatgtgagtccttcgtccaacatattgatcgtcacgcgtcttgattttctgaccgatacaatgccatacgctctcttatgcgtagtgatcgaatatcataagttgtcagattcgaaaatatcccttattcagcatttggcctcatttcttccggaatcacctgcgaagcagcttaaattcaagacgatattattccttcaaaactcagaattatacgacctcgagacggtcagggatgttttagatggatttgaaggatactggttggagaaggccattgtgtatggaaaggtaagcatctacgtgtgcattttctcgtatttctttctaccctgttctcgatttgctcatatccctcatcctcatctcctttaccttcacaaatacccgatcagcttcgaatgcatgacgcagcgctcgacatcttggcacgcgttttgagagatacattgacagccgagatatactgtattcaaggagagaaagtcattccttgttctgtcgggttaaacctcgctcgccggttccacttggacgaatggatggatttgagtagccatgatatcggctcaattggagcatcggaagagaataggaagagggagcttctgatggctttagtcaagatctatatgagcgatggcaacgagtgcgtcttgtttttgttcattcgctcttctgtgttcccctccagtgcgtgggaattaaaaactaatgaacacatcttgttaattacacgatcagttccgaatctacagccttgaaaacagctcatcttttgaacgaccaagccatgaatcttgatatagtagacgtgggtctttttctatgatctgtttcttcatcctttccggctttttgacgagctatctagcacggatagctgttgacatctgcggcctttcctttttgtcttgggtaaactcaatagattctggagctcatacctgagccttgggagcttcagcctattacttccttcttgacacggtccatccgtcgaacgttacatgatcaagctgaaggtcaaagtacgctcttcttctctcaatacttgatcctacgttctcttccaagctgacaatcagacttccgcctataatcacaaaacaaaatacaaaaagttctgagggcgctggcgacgtcccttaatttccagacgatggacaaagcactcgaagcgtttgcttcctatccacctattgttgagacctctcttgactctccgtcttctggagatggaggggacgtagacgagaagggcgaaaagagaggatcagcttatgaagagggggcaacgattgctgaaaagatcgtcggccatgctttggatgagcgagatgccacagtgagggagaaagaaaagcgggttgaggtcgatcggaggaagagatatgtggacgtggaggaagtggaagaaggactggcctgataggttttgttagaagcattggtgtcttgtaatatacccgcatatgatatgctacttgtcaggattgtcgttcttttgttgaaaataatggatcgtaggatagatagaggtgacttgtacattgagaattacattatcatacatagttttatctcttctccttctcctgtgacgcaggactatgctaccctgcctagcccgatcgaagagaacatcaacgactctccgatatccgatctttaagacgtttgtccatcggttcaagtaagagttgtcgaacccagccattcgggggaaagtctttttgccattggttgtgaaggtgaaggacaaagacacctttgtctttggaccaatcgagatgtttctgttttagttccccagattaaacgtggcaagcaagaaggtcagctctgaagtcgaagacgaggacgaggacgaccaaaagaaagacttaccttgagtttttccttcccacctttgttccacatgagtccggcgtaccaaccaggatcctttttgaacggatctggcaccctcttgtcttctctacaatttcttgggtctgcaaaacaccaaggcaagacctgaaaaggaacgatcccttgactgagtaacctccgatgggctttcaggtatagatgagatccccagtcggttgacttgggtcttggtggaggagatcgagccatgatgtgaaataatgagcagaggaagggagactgtcgatggaaatggaggagggcgccgttaagggacctatatggtttatctatgtatatggtttttttttttggttcaaatcgaatgatgaatgatcagaacagagcgatacgacggtgagaataggcttgcgcgctcaaagaagagaatggactgactatagcaatcccattgagtgacccattcgtcttccgtcaacacatgtagatctctcaaaaagatcatatccatgtctgcccagacacctccgtgtgtccacaagaccaacaacctgactaaatctccatcgacccaagctctctgatcttttatggcgccaccgaggagatccattctaccttccaacatcgtacccttcgccatttgcttgatgtcaatcttcttcaccttcaaattcttcccgtacagtttcgccaactgtgctaccctcggattgagttctactaggtcgacattcgaccaaaggatgaacgtgcttcgatctagcggctgggttgccaggaaagatttgattgtccattcctgtcgctccccaaatggtaggagatcccctctccaataggtatgatacgtcagatgtttcctctttgccagtagagaaggttgaatgagtgaagcgtaatcgaaacaatcatctggatgagtcagtgccaaggtcgactgaagttgaatgaccgagggggtatgcgagtagatggaggaataattccaagtagagggttggacggtcggtcttagattcgcttgggcatctaacgccgagggtgagaaacaggtctctgccagatctgccgtcggcgggttctcgagagagaggatctcagattcgatccatggtttgttgtacatcgaaaactcgacttgtatttcccatctgtatcgaaagacgtaccaaacggccatcccaagcaagaccgtcaaccggagggcggtcaatcggttaggaccccaaccagcaaacagggcggacctccagcttcctcgacttttctttgatttccgactgagtgtccctcggtaaggatgaagcgtaggcgagaccgatcttgagccaggaatcgctgctagccttctgaagaaggaattgggagggacagaacttgaggcggtcgatgacccgtgagggtctctgatgtcgtactcgtcatggtcgtgatcgtgatcgtaaatgcggtcgtggccgtaaccggaagaagatgattcggtggacgagaaggacgggaagtaagaacccagtcgactaagcatggatccaagaagagccctgccttgatgtatgatcgaacgactctgtcaaatgaagtgaaaaggctgctggaccagggaatgtgagccaatctgttttcaccaggacgagagaaaaacaaaagaccgaaagaaatcaaaagtggatggaggaaaatcaatacaagggaaaacgaggaagatgacgcggttccgatgtgaccagctgggcacagaattctttgtctttgaaccattcgggttcgtaccccaagtccaagttgatcccaaatgaacatccatcataagactcaacaataagcataagataaagatacgagttttctaagcaccgttcgtaccagagaacaaagacgcgactagacaacggtgagaaagcgtggtcgacagaggcatagaagggagagcacacggatgggatataaaagaacaaagacaagtccgctcagaggacaagcaagaggaacgtgttgagtcatcaaacgtagtttgacagatgagatgggagaggaggatccagaaaaggagcgtcaaagaatagccgtaaacaacagatgaagcggctcatgtgttatcgtcaggacatgagaagcaataaatgattccaagagtacatttcggtacaagaaagcataaaagagggatccatagaggaaaaagaggaagtgggtgcaagacacaagaaaagggagggcagaagaaaaccagagaatgggaactagtatgacaatgattctgagagtaaatattcaaaggtcaatcaatatccatattcctcggctagaatcccgcacaatcaaagataaaccactcgatcagttcaacgacggaagcgacacaagagagagagggcatgtgcagaaagactcactgtagatttcggcgatatgacctagtcgcttgtgcgctctcttagggttcattaaattcgacgagatctgttgagggaagagacacaagaaaaccgcccgttgaatgagaggtcaagatgtgcgatcaatcataacgatagcagatacgtacatttcggacgacactattcagagatgacggtccacaagctttgtgaatcaaacaaatcacggttccacagtcagatgtcagtcaaacgaaatcaagacacgggatcacagaagagaaagagaggaaaggagaagaagcggagtagactgacaagcaatgacgacggtgccttctgcgcaatcaacctcctcctgaatgatcttttccaactttggtcttcccggtctagccatctctgctacgacgttcagatcgtcttcatcaccttcatccaaaaattgatctttatcctctccttccttctcgacccggacgaagctctgcctttgttcatcccatgtgccaccgacaagccgtcgggtactttccgacccagatccagcaccgatgtaggaaacatcggtgaacgtctctgctccaggagttcgagctccttccgaccgaaagacatcatctgtggtgttgatacttgcgaacgactctcgtttgttccggtacggtttggatccagtccctaccccggtatcctggtcgaggaccaacgactgttggtgatcctgctgatggtgctgagggaagggcagatatgattgagccggcagagtcactacaggatcggccatcggagcatgttgttgttggtagtgatgatgattatactctgagagaccagagcctatgcttccagctgacggtccaacaggcaagggcggcggagcggcgagcccagacccaagtccaaatcctgacggtttacccgacttggcacgtttcctggaccgggcccttcgaatcctaccttccttcttaacacgaagagagaggtgtcgttccgccgcagtccgttcgttgtcttcctcgtcttggctttcgtcataatttgtcaactccaacactgagtctggtcgatggtctcccgacataccaggcgagaaatctgataggccgcttccccctctgcctgcagctgctgatgagccagagaggtaaccgagatcagcgttcgagtcaatacttagagcggacgcgatcgagtcttgcgagttggaccggctacgaatgcctttagcaaacatcggccgaggaggtgccagctcagcgtcgacgtgggcgtcgccatcgttggggaacaagatggatttttcggaaaccggtccatagtttgtgacgaagatgtcgatcgtcagttcgggtgctggtacgaggtcgatcgattttcggatcaagttcgacacccagagaatctcggcttcaaatgtgtatcatgaagcagttcagttggcgtggtgacttgagaaagattttaaagaaaagaggcgatagacacaactcaccaaactcccggacgatccaaacgaaacgaacgcgccgagtgatgaaacccttgcctcccttgcccttttcaccatgcttcttcctaccagctatacattcacacacgtacgccaagatggctactccaaagctgacacctgaaccaccacacacgatcaacacggtcgaatgttggccccatctaactctagctgacgaaccgtacggcccgtcgacgagtgctctgaagaacaccggttttgaggtcgaaagctttgtagctgccgatgtaaaataatacgagcttcgcttttcgtacgtcgctagtccctctccgctagtcgactcggttgatctgccggaagccatgcgacttttggtctccctccagagatccatcgtgaacccttttctggctttgacgagtaggacgatctcttgttcttcgtccgcgtcgtacacactcacgatggagaacgggtgagattgccagatagagatctctctgatctgaagtaggacgttctggccgggataccatttgaacggacgaggcagccggagtgtcagccgaatcatccgggagggtaaaacctgggcgagggcgtaaccggcaggaatgggcgctcggatcggtcgactatctggcggaggcgcgttgaatgaaaaggaagattctgcccgaattggaccgtgacgattagtgggcggtgaatgaagttggggtgggtacgagtacgagttatcaaagtttgacgagggggcagaatggggcgatagagaagagtgagagggagacttctgcagagactcatgttcggatcgatcacccgacaaaaatccatccgatccgtcgttcatcacgttcgaaagcaaaccctgggtataactcaatcgatgagggtaattcttactcgactggtttgacgacatgatcattgaactataacgattagggttatccgatggatgcgtgagctgctgaacatcgtacccgaccgagtcaatcgtgtcaaatgacctatcctgggacggagacgttggtgaagtgagttcatagtgggtgaggatcccatcctgggccactcccaagccagcggaagtgtcgactccgagtcgggtcatctcataatcttcatctttcttcccaaaggtgtgattgctcgacctcttatcggggtaggccaagccattcccgttgtcctggtcttctgcggggagaagagttgaacctagtttcgatcgttttgatcgtttgacctggttatttcccaagccaccccaccagccattgacccagccgtaccggatgaaccgccagagtctctctgccatccagagaccaccagcggcgagaggccaccaatagagttttggaaagtgtagtgcggacgtgatgagtgtcaacggtacgagcgttacgtgtgcaaaatagaaggcctggagagccacggaaagcgggggagcagcagagaaagatagaaaaggaagaatgatgaagaatggtaaggacactagtgaaagcggcgacacgaacagagtcaaaaagcaccagacaagaatattcatcaagactgacctcatagaacctcttccggacgggctgtagactgaatacggtcaacaaagaaagcaagatgaagctgacagcgccccagatgaatttgtcgtatatccagacgacctgggcaacttttcggtcagacccgtcgtttctgtcatctctggcaagttgaacgctccaaagggcgacgtgtaaggcggtgacgagccagacgagccgccctgaccatttatgcaatagggtgagcgtatcgtagaacatgtgggtcagcagcttgagggaaaatatagcgaacgggggtgactttagagcgaaaagtacagagagagggaaaagtgagaacgcgatcgacccagttcgggcgcctgaggtccagaaggccttatcgatcgtataactcggggtaaggttgacggtgggcgtggtggctcgtttaacaaatgaggtccggtaatcaaacaagtgggcgttcggaaagatatagtctgcgccgatgaagcaaaagatgagcgtaaaggcaaagagaaagaaaatagagacgatctgtccgttagaggggaaggagaacggttgttttcgtctgggtcgctcgcctgtgacagtcgaggttttggagagagtggttcgtttgatgatgatccgtcggacagaaaacttgcgccagattgcgcctggcgtgcctctgcccgtaccgaatctatgtccgagggagagcaggacaaggacaagagcgaagataaaatataatgtgtacgcgtatcggatcgatggagagctatgcgggaataggcgagaagaaggagaagaattttaggaagattggacgtgaaacgaatagagcgaacaatcgaatgatgaccaatgacgatgaactcaaagaggtcagcccgaaggaaagatggaaggatatgaaaaaaggcaaaaacacagtgaaagagagatgaaaagacaagaaagacaagaagaaaaaaaaaacaaagaggaagaggaagagaaaagaaaccccaaacgagaacacacctgagttgatgaatggagagataggccgtcacatagtcgtgatcgtctgctctaggaggaacggtcgggctggcgggacccgtagctgttgcagctgcccagtaggtgtctgttgaggtttttctggtggtggttcccgctgtcgtcttgagaacggtcgagacgatcgcggtacctgcgctggcgacaactgacgctgtggttgctaaaggaggcgtgtagcctttgtgacgattgtaaagagaaagggcggttagtttgccaagcatactgagaaagcgagaaggaggacaaacctccagtgacgatagtggcgatagtggcggcattagaggtggtagccatgaggaagtgatgtctacctagctatggcctgggaagaagaggccttctttgaaagaaggtcaaaaagacccgataggagtgggaacaaaaagacggagctagcgagcagacgttacatgaaagaacggctggtcgagtgagtattgatatacaccaagaggagcatcgaagatagataacacatacccagttggactatgagctctgtgtgtgagcagagtacgagtgattaagtgtactgggtgagtgagtgagcgagcgtgtagttgactgagcgaacgagaggatgaggaaaacagagcgatcgaaaaagagccggtgggaagatgcacgaacggatacaaggccaagagaaggcgggggggcacggccggttagtcacgaaggagaaacattgccggcgggcacgtggcaagtagggtcacgtgagtgaagcccaaatatacccccattggtcccaaacagtcctacgagcaccccaagcgcaacccccgaaagacaaactcgaaactcgatccggtccggaaggggtatcatcgactttttccttcttgaccttccctaacttcggtctgtctaacgattagtatgccttttcagggtggagggccgaacaggatcggggcaacaaagggcaggggcaagcggtgagaggcgggcgatcaagggcgaagaagagcatgctcacagggtttacaaatgctccctgaagttgaggtcagcctggatagtgaggcgtgtttgtgtgcgtggaaatgccctgggcgaaccccactgtgaactgtattctatcatgctaactaggcaatctctgccctggccctagccttgccctgatctcggctctgaccctcttgtgcctgccgccgccgctgctgcccttcttagtctagctcttcacgcttgatctcctttaattgcactcactcttctcgtctgtttatcccggaagtcaggttccttttttccctttcttttaccttttctctcctactccttcttctatcccttctatctcccttctctctttctcttctccatcaacgccactggtatcgaacactcttcataaacagattgctttctgctatggtcattcctacac

SEQ ID NO: 3142 - DNA, 5494 bp, Xanthophyllomyces dendrorhous
acaattcgttcagttcctcgaaggtcgcaagcaggacgtcctcgacttggttagttctctttcttcttctttcaatgcctctcattcgttcttcgccgaagctaacctatccgagcagtacgagagaatctctggtgatcccaggcactacaacgtcaccaccctcttccaaagagacaccaaaggcagagactttggaaactggtccatgtctttccggtccgtatagaatcacctcagaatcttatcccaagtacgacctcctgcctgacaagtgctctttgtgtgatttgtcttctcttttctttctcaaatttcttcagtgacctcgagaggttgaacaggggactgtaagcccttactcttctttctatcctctgcgcccatccatgagtaacaagtggctgattcgcctctacccgcctgattattgatttggttgtatttaccatcatcgcacccctcactcgtcatgctctccctatcactctctatcattgctccgttaaaaggcctgataacccagagaacttgcccttctcgactcaggaaaagtatgagagcgatgctttcaacgacattatgcttcaatcccatgcagagcaagtttccatttcttgcgctcctttttctcacctgaccgggtctacagtttcagactaacttttcgtcttttcggggttttttctcacagttctccccagttcctggacaccatggacgataccattaggaacctcatcaccctatatcacaaactcttcatgcgactctagaccagaccacagacatgatcacagccttctcttctctcctcttcctcttctctccccaccctgatctccaccatatacacgcatacacctattcactgaatagccgtagacggatttttcaacttttacttctatcattcttatcgcttttatctacattataccacttttcggttcccttaatctcatctttcatcatctactcctgctcttactcttttaaacgatcctctttttcgctgcatcttctatattgtataagatagtctttttggattcatcggaatacatgttaagtcgttgtggcaatccatagcaacatctcctcgagcgcaaggaaattgtgctgattacgtaacgcgttcatagtccaaggtcaaatccttgtccgcatcagcccatcactttttcatctctttcctccctcccttatctccttctagccgagcgatctgggacaacatctgaacgagagccgagagggtagaacaaaagtactacatatagtaacgagatgtcgacaagcaggaacaacaaagcgttcaacaaccggcgtagtcatcctactcctcctgttaccgccttgcgcaggaacgacagtgggaacgggttttctgtgccaccactggcaacagtagcagtcggaagcgagccgaagggaagctcgttgctggtaaggaatctaccgggggatgtgacgcttaacgatgtggatgtatgtctgttattcccctctgtttctccgtattctttggatccatatctgacccttgctcccttttttctctcctgttccatctatctactcactatgatggatgacaatatatgcaaacacaggaacttttcaggatgacgatcggaccactgatctcttgtagattggttcacgattcgaaaggctcattcgaaggaattgctttggtagaatttgtctcccctttggatgtacgctttatctgtttttttagtcttatcatgtttcgatttgtcgagagtcctcgtccgtgtactgatctcgtctttcggggatggtcggtgtgagtctgataggctgtcaaggcgtgggagatgtacaacgggaaaaaaatcgaccaaagtacgtttccttccttccttgtttgtttgtttgtttgtctgttgtttcctcttttcctccatctcttttcccttcttttgttcttgccgatttacatgcatcggagatgaggagaaagtgcacaagcttactgaatctaagacacataaaatattggaaacgcctacagaaacaccgctcgaactccacctcgtttatccatcgcctccgaccgctctcgttccctcccttcctgcgcccctgatacccactgttcccagaccgacacctacgcccaaagcaacgcccacaggcccatccagtctctcgactcggattccaccgctcaagcccaagtccaagattggaaagtcccggccaggtccgggccaagcaccgttatccgctcggttaggcccgtcggtcatcccgcttgaaagccgattaggtccccctcctcacgcgacttcgtctttgtcgctatctcttgccccattcggttcaaagccgtcatcagcagagcccaaagtaggcctgggcggaaagaagaagaaaagcggaccgatcaagaagcctatcatcaagaaaaagaacggaccgaagaaagtacagaacgggatggacggagtgcagaggatctgaggatcatttcttccttgttttggtcactgttctcttctcttgccttgattgaattttgtttcgagaggaaagaatctcgaagaaagagaaaaagaaatggtttccaataaggaaaagaagaaaaaaggaagaaaaaaaaacgcttgatcatgacagatagaaatcaaaacggcaacagatatctctatgatatcgaaagatcaggtttggggttctcagtcttctagcacgatgtgaattgtctcttctgcgcttttcacgcccactttcccctctttcaccgccgctgcagcagccccctctacagccaaccccacagccacgggcaccgatttagaagaccaagaaactagccgttcagacacataatcaaacttcctctggtcaaccgcccacgtcttcgggatctcgccctggagtgcctgggcacggagggcggtgtaaatcttgtaggcgcagaaagcatcgttcgaggcgtctggttgggttttcatcgagcgtagcaaacaacatacgtgagataaatatgtttagagagaagaaagtggcccaaaaccgaaagggagaagaaagaagaagaagagataaaggcggctcacattcaacttgacgttcgttaaggatagcagactcccagtttgacatggtgactttcttgtgtttgaccaactggcgtttaaggactgttcctactagaacggccagtcctctgacctaaacatacacacacgcacacaagaaatccagtacgagtcgatgagcgcaagggataaaggacgtttcctaagactggagagactcactttctgaccagagatcggagggcagatttcgttgaggtccaccaagcctttcgtctggacgcccagatcgttgttgatcttgcttgcgtcggctaatttttttcggttttgataaaatcgatgtatttatcgtgcagatcccagaatgagtttcatgaggtcgcttataaagaaaagtgtggaagaagaaagacaaacatcgaatcccgacgccaagtttgattgtctctgggtcctccagtagctttttcaactggaaagggagcgggttcatgctcctgaactggatctattcacaattccccatgaaaccagaggagaaaaaagaagaaggaggacgacgactcagaatgccaacataacaatccgaatgatgagaaggagaagcacacagaaagcagataaagactaacgagaacaatcgtcttgctatcagccagttgcatcaatgccgtcggattttctttaccgcctttaatgaagtttggtttccactcgatatctagtcctatcggtctattcgatccgaaaccgttcccaagaataaatatcgagtcaaccatgaaaccaaacccgattctctcaggcattgtgaatttagtaggtcgaccagcgctagacgaaccctttgagtagactgacagcctcgttggcggattttgtatctcccacaatcaacaccatcggtccttccgttccgtcagctgatggttcttgatgtctgaacggaggatatgacgcgaaggatgctttgagttcagacattgatgattgcagttgtggcggttcgattctaatttgtaaattagtttttgtcggttattcgttatccccaaaatcacaagtcggagagaatgagatgaaatataagattccgaagatgagatgaagccgaatgacacgcaaacgaatggaagaatagcatggaaggacagacgaacctggtacttgaaggaacaggagcagttctaacttcagtccctacgacacttgatagttgtctcactccctgcgtcgatcccgctggttttatacttttggtctgtcgatattttttagtttcattctggcttgggccctgtgtctgaccctccggttgaggttgagccaaagtgtggacatgagcgtgggtgtgagttcgggattgggttgggtgctgatgataatttcgaggcatcgttttggaaatagcgtttattgaccgacgagtgtgtatccaagtttgacggacgactatcatctggattgacaagatggatcagagagtaccctggccggagagagaggcaggaaagaggtgagaaaggagagaaagcaagggagataagttggttcggagggttgatggaaagtagataggtttgttggatgttttgtctcgtttatattttcggtgatttcctaatttgttacctcccactttttatcgttatccctagtttctcatacaaatgtccttctttctatctttcgtttcttcctgatttttgtttcaatctaaaaaccgagatgagaatgatcatgcaagggaagaactgtataacgactacaaaatacaatcgaggagaggaaagcacacagaatataaggtagcgaacgagatatgtaatccgacaagagagatagaaaataaagtaaacccaagggagcgccagaaagaaacgctctctccactccacttcttcgtgtttttactttgaatattaagacggcgagatctatacagatctgggctcagataggttcagaacgagcccaaacctagactggagtcaagaggaagatggatgaaagactgaaagaatggaaagaaaaagaaagaaagaaagaaagaaagaaagaaagaaagaaagaaagaaagaaagaaagaaaaacacaaatgcaaacaaggaacagcacaatataagaaaggaaacccctcgaggatcctattccgtcacatcctcgaaccgatgtcttttcgacccatccggtccgtctggcgcgtcctcctctagatgcctcttcagcccagattcgcctccaccctgcacttgaggtccgccaagaccaggagaagcctgaggatttccttggccgagaagagcttcgatggagaatgatcctctccgagactcggagaataaggtcgagttcaacccatcacctacagattcactcgaaattaaattctgaatcatcgccctgtatgtttg

SEQ ID NO: 3143 - DNA, 4064 bp, Xanthophyllomyces dendrorhous
ccctgtatgtttgtttatttgttgttttgtgaagagagagggaaaagagcaacaacgttcagcagatggacgaaagaaaagagacaagaagagatggataagaccccgtacatgtattgatcatccctgaggcccatcccaatcaatgggtttttcatctcctctccctctgcaatctctccattttgcaaagcctgagcgcccgtcaagagcgcatcatcgacagaaggatcagatagcggtggtcccgtaccgttgggcggtcgagggaccagttgaagttgttgaacagacgtcaagtgaatcaagtgtttctatatcatcatcaatcgccagatgtcaaatttcgatggtcagtcaatgggcgaaagcatgaggagaatgagaaacgaccgacctcaagtaaaccgaggagactctccttattgaatggtttcggcctacaaacaacgatgtaagcaaatgaattatacacacgaaaagagagcgcaccgcggatgcaaaaggtagggtgaagacatacagatgacccgtcattcctgaactcatgtacgacaacacatcctctggattgttattactcgtcatagaaatgattggcgctacatcaaaccaaatccatacacaataccacggtcagtctctccattcgagaagcaggaggataagacaagcaaacatactcatcgagtcaaactgtctgataagagacgtcgcggagacaccgtcaaggttcggcatcacgatatccactagagcgcgcaggacaaacagagtgaacaagcgagcgaacaaacacttcaagtcaactcggccgtccaggacaagaacgtgaaaaagggcgaacaaacttactgagaaccaaatcatatttttccaaattcattttattgaccgctccgattccatcggtggcgatatcgaaactgcaaccaaacacctccaacagtttactcgacatttttctgtagaccgcgtcgtcttccacaatcaacactctcggtggaacagaccagccagggacataagtggatcgcctcactcgaagcttgccagatctcttggaagatgaatgatgacggtgttggtgatggccatgcgtcgagttggttgatgcggacatttgagcattcactgaggatgaagaagaaacaacactgccgctgttgctgcttgcgttgccgttgggattgacaacagtgacagccccattagaggtaccattcacaggagtagctggattcgacccatcactaccacctgaacttggcggatgattccttccgttcagtccaaatcctccgaacgaactgtttctgcttcctcctgcttgaatatatgcttgctcatgagttccgtccgtcttccctcgtccatcttctatcgctcgaccttcgaccttggtggtcgatccgtgctcgtgggtttgacctgagcgcgaaagatggtcgtcccaatcaaaagattctccatcgactatctttccgttcccacttccaccaattccaccgccgtcatccgactcgatggattctctgaatctgagttgtccgacagttagaactttcaacccattcggcccaacggtctcgctcaagatggctgaacctcttcgacccatcatgtcgggtaacaggcttaggttcaaatctccgttcatctgagggttgtgtttgtagaagggagagaacgggttggccgtctcgaattggacagaagatatgccggcagcggcgacagctgctgtcgtagggtcgtcttgttccgattgttgttgttgttgttgttgttgttgctgttgttgaagagggtctccagatcgagtagccgtcatctgttgagactgactctggccctgggcttgcgcttgatcctgactggacggtctatcccaattctcttcccattctcttccaccgccagcgcttcctgtgtttcctcccgctcccccttctcctcctccaccggcagatcctccaattctaccaggctggtgttctctttcttttccttttctagatgttttcggaagatgataagctggatactgctgtcgggtctgactctgtgagctttgagctgagaacgggcttgactcgttcgaagtcgattgctgctgtgtaggttgtgtaggctcataggccggctggacgttccctctctgaaacacgtaatccccttgtggaccagccagattcgggttcggatttgagttcgtgtttgtattcgcgttcgagtttgtgtttgtgttcgtgttcgttctcgggcttgtgttcgtattcgaggtggtgttttgattcgagttggagttgggattgatgagcgcttggtagctcgagccaagggtgaaatgaggtgtctcttggttggatcgttgatctgatgatgtttgcggcccgtttcttttgggtgagtacagtcttctgtgtgtatatgtgtgcgagagagaatgagagcaggaagagaaagaaggctgaccgtagttttccaacttgaccaggtaaccaaccatatcactgacgagtgcctctgttccacctgttgctctctgtaacctggtcagatcgttcaacacctcctgatatcgttcctgcaacgtttgaacgtgtctgaagatcgtcgtatgactctgttgaagggccgcgacttgagcttggagtgcacagaacgcttgtggatcgatcgggcccagagtttggttcaggccttgattttgaccttgattttgttgttggtattgatggctactagggccaacgactgtggaaggagatgaattcgaggtcgaatggacgttcgaaattgagggaagaggagagatcggtcgacttcccggtacatctgatgatgtggctaggtttggattggaagatacccgtgatagattgacgggcctgcccaaggggtttgttgtggtcgattgagtctgaccggccttgttttttggtgcagggactttgcgctgttgtggtagatgttaattgtcgaacacatatcggtcgtgagcgagaggaaagacaagagaatgtagttggagaagagtcaaaggtaaggggggaaggaggggcaaaccttgatgttctcgagactttctccgctggtagtgttgaactctggatgtttaaactcccaagactggtgggagacgagcgatggatgaaatagtttgataagatcagaagtgtaacctttctgtttggcaaaagacaggaagagaagggatgggaagggaaactcacagtttctgctccttggccatcctcatttttcacctgatcgatggtttcccccccaaagcatacagacgcgacacgcgcatcaatgattcatcctgatcggaagcatctgaaacggcgaggaggcctgatgagaacatatgattgtataatgagaacgaaccttgtggaaatcatatttgttcaactgtctgacgaacgaggcaaagtttgaatgtctgaaagtttgagggctgggaagagggtggaaaagtcaagtggagatgaaggatacggcctggttagaaatcgattttatccgatgggacatgatagaagagcacgaggaaactgctggacaaacaggattcgagtggtgaactcattcatgttctgagcacacattgatatgaaggtaaggtcagggctcgatacactttagcagctctctccacgatagagaagacaaacaaggactgaccttgacgagaaagctgtcgcccttggggctccaagcgacaacatcgtcaaacgcgtcgtcctccagcattctgtaagacatgtaggcccggttgagaggtagaaagcagaaaagaaagaaaaaagagagcaaaatattagacagaacatttgattgatggtctagggcgcgagcgagatgtctccgaaatcaaacgaataggcaatgacgacaagaaggaagaaaagaaagacagggtactgacttgaagagctttttgacaaactcactcgggccttgagcgacctgtttgatgttgttgggagcagttccttgactagaagtcgagcgtgagcccatcgcactggacattgaacggagagcactgg

SEQ ID NO: 3144 - DNA, 3946 bp, Xanthophyllomyces dendrorhous
  misc_feature (337)..(346): n is a, c, g, or t
gtgtaatggtgtggaccccatgggacgggacatgtcggccggttggaggataggtggtaacgtcggcttgtggtcaccatcggcgtgatcccatccgaaagaatgaccggagggttcaggatggacattcgatgtttgcggaccgcctgggctggtggagtacacggcgtggtgagggtagccgctggctgggtgattggtgtactggctgattgggtgaccagagaactggctcgaatggatgtgggatggatgttgttggacgtggccgtggccgtgggggtgcgatagatgggttgcttgctgttgttgctgctgttgttgctgctgctgctgnnnnnnnnnnttgttgctgatggtgaagcggatgaggaggaggaggagggccgctggcgtaaggaaggccatgtatagtcataggggacggatgggatgtatgatgcccgccggcgtcgttaccaaagagcctatctgatggatgatgcatcccagacgatggattaggcggcggcagagcgtatggatgagaagcgttggacgaagaatgcggcggtggtggtggtggggttgctgtctgccactgatgatgatgctgaacgtgatgaggatgaccggagggatgtatcccggacaaataagagcctgggggagaggaagccgaagacgaagacgaagaatgtgagaggtgcggcctggcttgcctatgagcattttccatgacctggacacctggattggctgctatctgggtgaacgatctggagagagctaatggcgagagaacaatgtccaaggatctatctgacaagcgaagggggaacgaacggagggaatcaaaagagttgatggatggaaaggatgaggggaaaaaaggtgctatatttttgcgaataggatctgtagtgtttggtgtgaattttgtagtgtttggtctgtagtttgtagtgtctctctatgatttgtagtgttttgtatcaatttcgtagtgttttgagtttaatttggcagtgtttcgtattcatttagagtctttccctattcatttatattccttcctatttaatttgtagtctctttcccctcgtttgtcacactagactcttctgatggcgtcttttacctgtgcccgcttagatgcatacatacacacacacatacacacacacacacacacatacacacactcacaaacatgctccctccctctctatccctctctatccctctcttatatgctctctacatcaccattccaccttcagagttcgtccacacctctccgtagatgtgtacgtccgtcaatcagaccaccacggcttcaggtccggtcggcaaacacagtcgatcagcacggtaaccctaaccgagtccgactgttaatccgataaagaccgtcttctttggcattccagtcaagttcttccagtctctttgtcggtatcttctctggcttctcttctgtcgctgtgcagtgattgggtagtggctctcgagcatcgtctgttgttcacagctctatcgaccaacacactctctgttatacaagacgattccttctttcggtccatagcttgtttgctctctgacacatcatcctaccgagctgtcttatgcctgtcatcgtctagggtcgcctgtctgatgaagatagcccagtggacacttgaggttcattcgttcggtcgagttctgccctgaattcgccgtgacggtaaattgtcattgctcgctgtgaaaagctgtgaaccccggttcttgtccggtcctgtcagccccctcgttcctagtccctgattcagctttgcgcccgagaccttccttgcacgaggctgccctggaccggtccttgctctttctctctctccttccttccttccttccctctcttctcatcttgtatcgaattctctttacctttccctgctttagtcgatcgcagtcgttaccgtcagtcctggtcgaacaatcagtcaaaagaggacctaatctcagagaacacatctttgcgcttgagttcaacgtgacatctacgtacaagagagtcaatctgctcaagagtacataagaaaggcaacaaggtatctgtccgtctacgttgagtttgaacatcgtgccgacgcgctttcctatgcgacataacgacccaaactctggttcttgggactcgatccgccgggtttgccataacgtagctctcacaaaggatactctcggatcattctcagtcgagcgatccaagtctgacgattatatctcggatctgaaccaacgctccaaaccccagtcaggaaacaggcataaacgatcaacttctcccagacgacagaaattgtggctgtgctcttccgaccgactcacccgcctgggctgtttcctctgctgcatgcaagttctccatggaaatccagagggaaacctacccttgtgaacggaagctgaatgagtataagtgtcgatatttaggatcgtttcttctttctctttttcttctttcgaacaaatatccaagtggtaagcggcccccataggttgagcatgaactgagcttaattttggatatgtgtactgacaatgtttccttcttgctttgtgttttcctttttttttttctcttcgcatccccttcttccagaacacaaaagttctgtctttgcctcacaattgcatagtcagcgttcccgttcccgagagcaacttttgtctattccttctctttctctgaagcttttgtccgtaaaactgtctgtttgagtatccttccaacccaaacctggctttctctgggcgtgaccgtagggacgtcctcacccttcattgggtttgacgggcaatgaccgggttgtgtttcgggccggtcaggggaagtttatgaggatggctaggccgaaagtaacggaggaggctcgcttttatgggaggtggacggacaactctttcctgtactattcgttgtatttgtgtataccatgtgtgtgcaccatcgtcatgatccggtttaaaacaagacagagaaaagacgattaacaccagagagtcaagaaagcagcacacccacagacgcaaaaaattgtcacagctgttgtgacggatgaaccagctaacagagtatcacatcacttccagatcgatcaacacctcaaccgatcctttttgcttcttcttttcttgtcttttctccccaagggaaacagcaagagactgggtgacaccagtgaatctttcttctccattcagacagcaggctagttgttcaaaagcaaagaaggacaggattacgttgctcttcattcgggcagagaaaaacagggaatccaacttcttgtattcttgcttcgtctccgacttcatccggtcctggatttcttcgttgtagtcttcttttcttcctttttctctcttcctctctcacacacacacacacaaaaacacatctcttcttctcttctcttctcctgcgtgctccccgatctatctcctgtcgtcttgttcttgtatgcctctcggtcggtcgatcgatcgagatagatgcctgtaccttccatcgatttaattcatccagctggaccgagccatctctcaaatctccatcggcaaccgcagttacagcaccagcttttgacctcaaccaccaccccgtcctcctcagataacatcagcccttctccgctgtcctcttctgttgctaagcctatccggccttcgcaaacagacatgtcgaccaccgtccgtccgaattttcgagctcggcaaggggcaggcagtgcgcctccgggagaggtcgacagggcaaacatgcttggttcgttcttggagtcgacgggcaaagctgaagatacatcagaagagttcagccatgtgagtcgtcacccgtttccttcttctttccgtctctctactttcttctattctctatcttttctgccgctctctctctctctctctctct

SEQ ID NO: 3145 - DNA, 1815 bp, Xanthophyllomyces dendrorhous
ctggtttctttcagaggatacacaacactgacaagaccatagcaggagagatacagctcatatatatacccagggggtttctcgctcaacgggaaatataagtatacctcagtcgtttcgatcgccggaacacactatacccggatagacttgtttgttcgctgttctccgaggaaagtttataacgcggtatgtgtcctgtcttccactgtttgtgtttgagggacgtttggtagtcgtctgagtgctcgaaagtgtcgtccaaagcaagtctcgaacgatgagaatgaagacttgtcaggctcacgtcttgaagcatcgaccaaacttaccttgatctcaagaaagttgactgatccttgttcttcctggggtttcgattttcggttcgttcagtcagacagagagagagagaaatgtctgccggacgacatgccgcaggtcccttgaacccttcgactcctatacggaaaccaacacgtccttcgtccaacttagatactaccactgcctcatcatcatcgttaacaggctcgagaacaggtcagagttctgacgacactccatcgaaaaaagcaccgagtagagggaccgtcaggctgaaaagacaaccaggcgcaaaaggagtggtacagtatcagtctttggaacagcttctcgctcaagccggtacgtctgcttttgctctccctcttttcttcttctctggaggagaattccagatgttgatcctaacggatgatgatttattgttcttcatatgtgtgtgtatatgtttatgcgttgatgctatcaggctatacagagacaagagtgatcaccccggagagcatacggatcaaagaacgtgctgcttggattcgggcccaagaagaagaggagcaacaagaggcgactcacgcacgtgaaacaaaagaagtttcagagatcgaacgattcttatttgaagatcatttctcgtcgtcgacgaccgactcgacttctcaacttgactcgaactctgatacagatacggacacggtcgagtcaataccaaaatcggagccggggtcggggtcgaccagccttggtcgaaatgtcgatgagcagagtgaacgggagactgggaaggcgaagaaaccctggagcgcttttaggcctgtggtagacaatcgtcagcatagccgtcaacatcgtcatcaacaactgcaccatcgtttgtcaaaagagtgggattcatcgtcgaacgcgattgtatatcattatcctgccgacgccttttctttggtcgatcatccgactacaggtaggatgcctagggctgtaccctccttccaggacatccaaaatggtcataacaacaacataaacaactgtcacagcgaagaagaatgtggctcgctatcttcctcactctcgactttctccgcggcggatacgatcattctgtcccctcctgatctaaacgttcaggcgttcgagaatcaaagcgcgagtgaagatgacgcagatgacgaccaatcttacgcgacgtggtccatcccgtttaacgagtcggttgaagatcttcgaatgtcgcaagcttcttcaagacctatccgaccattcaatcgatctatccatcatggtcaaacaccactgccattaccgaacgctggacctgcacaacaggcgttagagttttcggaatcagatgttagagaagacaagagcttatttgctagttcggaggccgctcggtcgttacgtcggatatcttccctcgctcaactttcttccccaaactcctctgcgtccacatcggtcaaaccgaaattcttcaacgcgtttacgttc

SEQ ID NO: 3146 - DNA, 14388 bp, Xanthophyllomyces dendrorhous
cttttcatcttcctccttttctcctgcttcggatgaagctatactcaagagaccagctctctctacacagccaaaactaccggaccaagctcacgacacgcttttgaagagaacactccgccacacagcgtcgacacctgttctcgcccgacgtacggggtcttcaaactcttcgtcagaggccgtccctcctcttcctacgggttggttggagacaataaaaaacacactccaatcgaccatctcgtcaacgccatcgtcgataataccgtccacgtccactctgatgcctaaagatgcccctccgatacttaggcaatcttcttctcctgctgttctttctttccctctatcctcctcttctgcttcttgttccgagaacgtggcgaatgaaaagcccgtctcggttcatctcagatcagccccactcattcctaaattaacgccttccaccgtcgtttgcggctcggaagaaggagaggatcttccaccattttcttccctcagttttttcaatcaatcctctggttcaaaatcaggatcaacatcgacatcctctccggtaactccccatggatctgtctcagaaaccatcccatcacctgtgctcacaccaaagatctccttcggcgaaggtgaaggttggtcgcggacgacctgtcccggttgggtatggacggaaggaactgacgacagagaagaagacggttggtatgccacgccgatgtgttcgtttgaagattctcctctggataactcttcccctcctcgatttcgggctgctaccgtctcttcttcgtcttcttcatttactacatctccagcctctactgcatcagccacctcggcggcgactggaggatctcggttcgggatcctacgcgctcagagatctatcaaatctcttcgagagactctagcagctgactctactgctcaagcagtcgcactcgctaaggccaaagctcaagccgaaatcaaagccgctgctgctgctgccgtcgccgctgccaccgcagctaaccacgctttcagattcaagacccccaatcgacgacagaataaagcttcatcccctttgtcgatcaagcatcgaagcggccctgtccctatattctgtatctcgagtccagacacgttagagttaggtctgccgccgcgagaattagatgtagaggaggaagagagaagagcgtccgctttggtagctttggctttatcatcttcaagaaaagaagcagaggacgaaggttggggtggaggaaggaggaaagcggtgagaaaagagagaaaagtaaggagagaggtaggaaggaagaagtgagctgagctcttggaaacctatccctaccctcctcctgcaacccttccgccttgcctctttcctactgtacttgcgtttttttttgtttccttgttcgtgttgtttctttcttcttgcaaattgcgtctatctgtccctcctttttccttcttttcaaagatcttcacactgtcattcaaaccaccggtctacaaaaacattctccaattcattgattatgctatccttgctcaagctcctgtttcatatcctcacgtttctcttctttttctcaagtgtttcttaattgcatttataccctctcttctttgcctcctaatttttcattgaattctcccacattcatccattcttcccgtccttcagcttcttcgttccatgtttctctcgccaaacctgctcttcatactttcatctctttttcacgatccttcagtctgttctctgacagagctgtcgaaatatcacgatgacatgtcctctttgccctctttactcatcttatatctgcagaaaagaaggaaggacgaaagaagaatcgtacactcgtgagtagatgataaatctttaggacaaggataaaggagaacagagacccaaaagaacagagaaaggaaacaaaaagacaacacatagagattgtacggatcaaaatggataagggaattgatagataagtataatgaataaggacagtataagccgaaagttcactaccggaagtcaatagagagaaaagagagggaaactcgatgaacgaaaaggaattagagagtaaatgagtgtgtaatgaaagacaagacggaaaaacatagtacacatatttcaaatcatatcacaaaaaggaccgacagatataccacagacaaacgaacgacagatgtggccagattgatggaaaagagatggacggagacggcagtggctcagagtaagagttagaggagaacgtcgtcctggttcttcttaattttcatcatccaaaccctgtggaatcccagagaggatctagtgagttacaattcttgatgacatcgggctacaaggacagaagacataaagggacatcacaacttactccatacttccgcaggacctgcctgccgattccgccgttccattcctcgactcttcgtcgcgccaaaatactcactgttttgtcaaggtaaaggcaggcgataagaacctcctcaacaaaagaagatacatagtagaaagtagaacatactggtgctaccagaggtaccaacaaagccggtaccgagggagagagcaatcgaatcgatcagagttggatacctatatttaaaaagagaattgtacgcgaaaacaaccttttggttagtatcccagtgcttaaacacaacggaagataaggatggcaacgcaccaaagcccattcttctcaatagtcaattctttatcatggtttagcatgatccatcccagatctctaacctccttcaagaagctctcgtcatgctcatccgtcgtggccaatacatgagcggtcttgatgcccttttcttcgagaagaagtttctgaacctcggccactctatcggcgtatttttggataggagcatagcaattcttgtcggtcgttcctgcgagttcttctgacgacagatccttgcagatatcaccgatgtcacttcttctgatgtgaacagagatgaactgtgaagagttatatgagacttaactagagaaagatcttgaagaactgaagacgatgaggcgtgactcaccggaggtattcgtgcacctttcttatccttgactccaaacgccctcctgaggtatcccttggtcatctcctcgatctctggctcccacctcatgtactttccaacggtctcccaagctccaaccttcccaagcttgcctcggccagtccaatcgtatctggagtcaccttcagcttctccaagattgtacaggaaatcgatgtagagcacgtggtcgtcgggtgcgagttttggctgctctctgtgtcgctcggtaaagtaagacgggacttgagtcaaatagaactgggtgaaggggttgggcagaggtttgaagagggaggcgagggcggcaaagtggacagatgtccagtcaatgaccggtcggaaagtgacgggaacgggtgtgaagtatggctctgaaaagcatgaaggcattgcattggtaagtgtgtgcgttcatcgcctgagcgggacgagacttactgatcttgtaggtatccaactgataacacctccttccgtcctcgatctccttattctgttcttcctcctgatccgaggtctttggcttgtgccactccgggttggtcaccatccagatactccaccctccaatttcttcttctacgggctgaatggtgtcctcctcctgcccgactaaaagcttaccaggaactctagccttaagctcggagattcgaacaagaggaatcccaatagtatgtgacaatcgaggaagatcaaacacggtttcgaaaggaagggaaggcgggatgtgcgctgcatcgtcaatgtatcgaagatgtcgcgcaggagggaaaggaaaaaggataggcgttcggttggtcaagagaccaaggtggatcactgaatttagagtaacgaagaaaaagggtgagtggatagttgctcattgttatcagctagagaaagaagtgtagacgtacaattagctcccatcatcacatcgtttgctaattggaccgacgcatgaaaagcaacgaggttaagcaacatggctaaagacagaagtatgagacactggactcactccatccagaatggaaaccagacatgatgtaattcatatccggacgaaggttttctgttgcacaagatgacaaacaagcgaggcttagtatctgcttgtagagcggaactggtcccggtgcaggaagtcgattatatgcgcgtttcttcaacgaaggctttccgcgcgaagcctgatcgaaagggacaacgtccgggaagcagaaggaagaacgggcagaaacaagaacaggagaaaggtacaacttacctcggaagttgtctttcttgccataactcctgagtgcgccatcacttgcattcttcccagtccagggtgtagcgcttccccattggaccagactagaaactgagctcgctccgtcgatgactgaatcatgggctgtctcattgacgaacggaagaaggacgagaatgaatgtaaaaaggattccacagataatgatctgaggaaaaagagcgatagagaatagcgatgagacgaaagaacgggagaggaaaggtgaattgactattcggagtaacatttgaattcagttgaaacatctccgaacgaatcagcttgtttagaggaacgaaacgtttgggaacccaggaagacactctagatcctaaaggttggtaggcgactgccatggtgctgggatccgaatgggctacgaaaaaacaacgagggacaaaaacgaaaagactgtgtgtcggtggtgtgtggacaagaagatggaggaagtgagaagccaagcagcccggatggtttagactggaaaggacaagattgtacttggtggaggcgcagcagaggtaaagcttatttgaaaagtctgcttacctaagacacgcgtcgcgtcgggtcgtttgtcttggcgtcgcgttcaaattccgttgctcatctaacgatctctgttaacatcttcaagaagcactcggcactcggcggttgatctttggctgttgtaaagacgaagaacaaatcgtcatagatagagctcatggcgtctaatatactccccatagacaagccgtcagtacatagaatcacttcgggacaagtcgtcaccgatcttcaaacggctatcaaggaactcgtcgagaacgcgcttgacgcaggctccacatcggtcgaggtacgcttcaaggattttggcctcgaagtcatcgaagttgtcgacaatggttcaggtatcaataaagtggattatccgtcgataggtctgtttgctgtcttttctttctctgaaagttaagaggctgtatcgactgacgatgcgatctattctcttcgaccatatagctcttaaacatcacacttccaaattgacatcgttcgctgatctgtcttcagtcagctcgtttggctttcgtggagaagctttgtcttcattgtgtgctttgagcgaatcggtcgaggttgtcaccgcaacgcaacaagaggcgcctttgggaacgatcatcacattcaataggttgggtcaagtggtagattcgaccaaaacggttgctagaatggcgagtctacatctcatcgaatcaccttccgcccgttggctcacaaacctccttccagatatactgaaactttttttaaagaaaaaactctctccggcgtaaaactgctacagagaggaactaccgtaacaataaaaaagatctttcaaccggttcctgttcgaagatacgaatttaataagaacgccaaaagggagtttgccaaagcattacatcttctgactgcctacgcgctggtaagctgcttgactggagccgacgttagaatctcagtagtcggaaccggcaaaggcaaagggtcgttagtattcttccctgtttccttggctccttctcatacatcaccatcccgagactaacgatctttccaaattcatccttcaaggaaacgtacagtccaccttcaaacaacctcctcgacttctcttagaactacgatctctgcactgtggggtccgaaagcaccagtcgagatgcaacctatttcccttgaacttgaactgatagacaaagaagactcgtgagggttttctctccactacccaattccatatcgcacaacctttcagttcatctgatgatctatgtttgcatcctccgttggaacaggacaacgcggacttatagacttgaaggcatgatctctctagatggtcacggtcgatcatctcctgaccgtcaattctattccatcaagtatgtaatccccctaagacgttgttgtgatattccgagatctcacgtatttcatctactgttgtttctgtctgggatgaagtggaagaccttgtaattcctcaaaggtaattctaaatacatatgccatctcacaaaaacaagttttgaaactgcataaatcgaaacgtaacagaatcattctctctgagctctaatgcacttcgcgcttatcacagctggccaagatgattaacgaggtctatcggtcgacaaaccccaatcagtcgcctgtagtgattctagatcttcagcttcccaaaagtctgttcttatgtagtttgacacctcctttgattatgtttccggaaacttcttcctgaacttacccgacttctctcgcttctgaaatactcttatatggtatatcttcctcttttgaaacaaaaaagctgcgtgcgatgtaaacgtgacggcagataaaaggacgatcttcttgcatgacgaaacagacatcgtcgatgggttcagagtatgtagatttatccttgttcctttactagtctctgactttctagctgcccactgcaatcatactctttaattttcctcgagaagctgattcggatttaatactcttgattcaattctggaccacttcgtgactttagtcgaagctcttagtcttcttctctcactcgtcctccaactctttccccctccctctttcttcggttcaaacacaatcacagaatgagacccaacaggactctgaccgtgaggagatgtctcctccaagtacccaacagagttcaataagagattcgcgtccgtacgggcgctcggacggaggaagacagacaagtattctgtcggtgtttggtaaacgtctgccagagaagaaggaggaacttggcgatagcgcgaacgagatcgaggatcaccatgctggtcatgacgtaaaagagtcggaagctgagcagatgaatgaagagcaatcggaaggtgaagaacagatatatgctgatgatagttcgaaatcgattgaacccgattcgacagatcaacctcaaattcaaagggagattctcatccatcgccgggcttcactatcttctgagcaagatgaagaagaaggagaatcagagaacggacgtagaaagcggaaaatcatcgattcagaagacggtgaagatgatgatggcgatggagtaggcggctgctcagagtttgatcatgatgatcctcaaccattgtttgttcaacaagaacgggagggagaagacagatgtactacttcccaaccccgcttcccgacccaggttcttccttctccccctcctctcccatcttactcccaaaccgatcctagaaggcctgatcggctgtctcgaacgactctgcgctactctctctcttccattcaatcacactatcgatgtctaccttccttgcaaaccacctccgacgatactggttcgaaaccaagagatcccgagggtcaggaaatgtcagaaggcgatctcgaaatatcggatatcagatcttccgcagcggaagagacattggatcggattgtgctgaaatcggatttcaaacagatgaatgtgttgggccagttcaacttgggtttcattatcactagcaagcgagggaaagaaggcagagaggacttgttcatcgtcgatcagcatgcagcgtatgtttcttttggtcaacactattcgtcattgaatcaggctcgtgcatcttgaactaatttaccttggtcggaacacttgtctcgttcttgggacgcaaactgattcagagatgaaaaagtgaactttgaactcttacaaaaggagaccaagattcaatcccaaaaactcatacggtcagcgatcttgccgctcatcttatatttctctcacgatggtgtgactgattctctttcgaggacctttgtgaatgcgctcaatactctttattcttcttagacctcggccattggaactctcagctgtcgacaccgtcctcgtacaagacaacctttccatcctccgaaagaatgggtttgacgtcgaattctcttctgctgttgatggtaaccatgatgatgaggagaccgagccgaatttggacgacggaatggaaggggagagttggtatcctggtagagtctcactctgtgctcagcctgttagcaaagaaacagtatttgattttcaaggttcgtcgtctttcattctcatggcctcatctcagaaggatgaaagtagaacacccgattgaatttctgttcttctgcttcaaccctagatctcgaagaacttcttcacttgatacgagagtcgccttcgggcgagatggtccgttgttcaaaagcccgacgaatgtttgcttcgagggcttgtagaaagagtatcatggttgggaaaccattgtcgaagcgacagatgcttaaagtaagtctattttgctgctgtctcatttgctatatattgggttctgactaacgtgactcctcgtctcttgtgaattctaggtattggagaacatgggacgtatcgatcagccatgggtaagccttcctttcgttctcagattcacagaatcccatcttctcgatgccaattaatcttttcctctctcgttgtctagaattgtccacacggaagaccgacaatgcgccatcttattcatcttggtccacccaagaagactcctaagcgaaggttagactgggagactttctctcagaccgatgacatctgaaaggtataactatttgtcaagctcttctaacgacggtcattgagagcgcaacttgatttgggcgcgcatggccactgggtttgatgttgtatgtgaattcgcaacaaacgatgaagcatccatgtaatatatatgtatagaacaagaggacgtcagaaaaggaattaacaaatacaaaacagtctcccctgtcatatcgcttctaaacgcaaaaagcatcctttcagactgcgctgtagtccatcttggtttcgtgcttcttggcgtcttggagcttacgaacagctttcataaagtcctcttggacacagtaatctctctctgtttcgcgagttcaagacgaagccgttgagtaaagagaagaaacaaagactggaagtggaaaacattgatacggaccttctcggatggcaaacataccagcctcggtgcaaacatttcggagatcagctccgttaaatccatccgacagctttcgaaagcgataaaagtatagatccggaagttagacgactggagagacactaaattagcaatactgaaccaaagtacgacatagcttaccttgaccatcgcctcgtagtcgatttcaccttgtttgtttactggtcgagcatgaatctgtggaacaatccaggtcaaaataaacgcggagaatgttgaaaagatttcatcagatgaacaatcaagtatttcgatcttccgttgactaggttctaatcacgaaccttgagaacttccatacgaccttgctcgttaggtaacgggatctcaatcttcctatccagtcgaccgggtcgaagaagagccgggtcaagcgtatccggtcggttggttgccataattaactttgttcggccgagtgaatcgaatccgtccatttggttaaggagctgttcgtattgggatcgtcaaccggaaataagccatcagaaggatttaatcgtgagatgatctgatctaaacagattcaaatgtatcaaaatcaaacgaacctccatcaatgtcctttgaatctctcgatccgcgcttgttccttcagagaatcgtctaccaccaattgcatcaatctcatccatgaagatgatgcacggctcatgttccttggcgtatgcgaacatttctctgatcaatcgggccgattctccaatatacttgtcaacgatctgtatttagtggcgcaaaccgaacaacgaaaaactctaaatcagaccgtctaggttgaagatgatcgatgatcaatgatcaataccaaaagacgaaccgctgaagaaacaactttcaaaaagttggtgttcatcgttgctgccactgctctggctaacaaggtctttcccgttcctggaggtccgtaaagtagtacacctttgggagctttgatgccaactcgctatgttatggaatgaaatcaatgacagtcaagtcgcgtcagaacagatgagtctcatattccctatccgtgcacatatacgtacagtaaacagttctgggttcatcagtggcagctcgatcacctctcttaattctctgacttgatcacccaaccctccgattcctgcgaaagacactcctccagggtcctcaagggacatagagtacacaagtgggtcgacctctcgaggaagaattcgcattatcgttaacgtcgtcatgtctagcgagactcggacacctgcaatcagctgataaaaataacccgatacagacgaattggcgaacagtaagatcagccatgtgcacaagagcggattgaaagatgaaagagatgaatcttatcgacaggaagctgaggtcgatatgacacaacataacgcgggccagaggaggccttcacgatgactgcataattcatttgaggttaggcagagagaagagcgaagtcaggaaccagctactttgagtatacgcgtctatataccagtggtggaatgtctctcaaacagcattttgcttcctttcaggcggaacattcatgataacttcgatggaaaagtggaagcccacagagacatcgaacaagggaaccgagcacaaactactcacatcgttcgtcatctaactttttcagtacctctccgatgatttgtcccacactctggagagccttgatgtcgtcttcgctcttgaggaacgcagcgtccaaatctttgattgagaatcggactatacagacagaaacccgagcgaatgaagtttgtgagctctagctctcaagggaagacaaaatataggatgagatatagaaacatgatggactgaaaagcacgaacgattcttgacattttctgaagtagcgttatgatctttaagtttctactcgtgccgatcaacccagaacgccagaaggtaacaagatacgattttgtccagatcagaaaaccagtcaaacaggagacaaagtcaaaggtcagttattgatgcccactcatatgctattcttgcattcaccgtccgatcaacaaggaaggtcagtaatttcaaaggcttacctgtctgtagagtctcaaggcgacagccttctcgtccgaaacggttcttgcaggtgcagaaggagccaaagaagaggtatcggtcggggcggaatccacttgcataatgtgctcaagctgattctataagttctattgattaagggtaagtgcaagagcgtgctaatgaagagggaaagagtggaaggtataggagatgggatgatctcaaggccacagttcatctggacaggtggagattctttccttctgctggttacgcgtagcccgatcggttacggttactaaccactgtatatttgttgcctatactttctattcagaacaaaaacgtccagagaacttaagagtcaattttgacaaatgcaacgtagtttgacccgaacctgttcatcgagttgaacaaaagcaagtctacaagatcttgaatctgatcttgatcgtttctatccaaggaaaaaagaaagtcgaccgattggatcaggtccttgctggctctaagtttgcaatattcatagatctaggcttcaaccaaaccagaccaacctcctaactcaatattggtaaaatgaacaccctcgctctgactactgctaagaagatggtctttggacctcgaaactacatacatcaatctatcttcacccaattgatccactcatctcttcctgtgaccgccaggagcttcgcccgaggggcgagagacttaagagcttcttcactcagaactaatgcgagtctacaacatgcattggcagacgaaccgatactcgaagatagcgtaaccatcccatcaatatcagcatcagcattctcatcaagcacatcaactcctctgaagagcacggctctcttggatactgatactaatggctctagccgtgtggatcaaacccttttcgtatgttccacactctcgctcatatctctcttttactcactgctcgaactgatggcatcgaatattctgttctgatgtgcttgaacaatgaaaccaaaggtggcaggcatcccgaatgttgcccgcgaacaacacttgactgagtactttgaggacttgggaataattgtgcgagatgtattcgtaccttcggctttcaatcagaatgggcagaagagaaagcacaatcgagggttcggatttgtcgaagtcggtaccgtgaaggaacaccaacagcttataagaatggtaggtcatcatgaactgttcatacaatccattcgtcatggatgggacctgtggtttcagatctaaaatgcctatgtatatcttgaaagtccaaaaacaagaaaatcgaatttgatctgaaggtttgttcttcaattccatggaatcctacctgcgcaccgctcatctgactattgtgttctttcttctcgctctctatggataactacttctttcgaaagcctgctaagtgggatatcgaacgagcccggtcctacggcacaccgtcaccctccatcgcgcccaaaattgaaagcaaaccgaaggattcgaaggcaaggcctgatgataaagcgcgctcaagatcagcaattgagccgcaaggaacggaaaagaaaaaggcgagaagaaggataccatccttctctcgacgttagagtttgtgtcgtaaagatataatgtatgcatgttcttcgtcatataaaacataggacgtgttggaattgaattaaggagaacgcaaggctcgtgtttcgattgaacggaaatatcggctacaaataattgatacaatggctatgaccactcctttcatacaaatcagtgatctcccacctctttaccgaccatcccgtgatcaacgatcccatcaacgcttccaaccttttgatctggcttctgttcctttccaaagtttcctttggcataatcgtctgcgatattgtgatcggtgggctacgttcgataacggtggagccaagatcaggatcataatggatttctagaggttgggggtgaatgctcaagggactgacttgtttattggcagaggggacaactttcttcgtctctgctggctgcctgaagggtgttgtagcggatgatacagacaagaacaacatatgacctgatggtcagtctgtttgttctctctactcaagttagtggcacaaagttacgcactcgactgaagaattggtgaccggcttggtagcaggcgcatcagcggtaaggttggacatggtttctcgatggacagtgtatgagaagagtcagatgttcttaagggagcctaatgacagagatgggaaacgaaagatgagatgatcacagagaatagtcatgttttatatgtagcgcgagtcctggctttcatgcctcgatgatggaatgatgaatatgtgatgatcatgatcattctcatgatgatgatgatgatgatgcgagccaaagtagtccgatcgagaggagccacagtaagtgtagccaaagttgacgggaagagagtacacgtgaccagcggttaaacccaaaatcagtcgggattatgtgccgttcagtcagtctgaaagagaaacatcgtatgcctcccacaatgggatcgtagtccgaagcacgcctctcggttaaggtgataggaaagggaaggcatgaagagaaaaaagcaaagagttcacaaagtccggaactatctgcgtggcttgcttctacagaaccttttcaaactgctcatccgatcaacctatcggccgtataacgagttgaatgtgcaaagcttcgtgccgggagctctcatagactgagaatcttccggtatgtttacccaacgtctcaacttgtagtcaagatttagctgggctcggatattttgatgatggcatggtgtgagtcaggagttgactgtga

SEQ ID NO: 3147 - DNA, 2783 bp, Xanthophyllomyces dendrorhous
gtgaaactgcgggtatgatcctgaaacgttcgagccaaacgaggagaagataaatgtaaacagaaaaaggccagtgaaagccaaaacgaaagcaaggatgggaacgaaagcgccatgacatccgaaaaactcaatctgaggcaaaggaattggacagtagaagaagaaggaatcgaagtgttcactagattgtccaggccttgagcgctcaagccactcggtcaacgatacattagactgggtgtttttccgtagaaccccaaaaaacattgccaaataaaaaaagttccacaggcaggtgaatcacatcttacctgcctctttctctcattctctatccatccgttttggttcacttcgttctctcgcactcacatcctgtccattgctctctttgttcttgcttgttcctctgttgactttcaccgtcctttcctaccagtctctctttttctcttttcactttgacttttagcttctgaaaggccttaaaagtaggagttatgtcaacccatcggacgaacaattcgattgataccactgccccctacggctccagtaataacaatctacacgtgagtcctcattaacttgatgtccatggttgttgtcttcctaaaagattgagtgctcaagaatgcctgccctgttcggtgacttgacctctcacacaggaagaggcctacggcggttacgatatgcaacagatggctgagaagaacgctagccgaactagattgactacggccgaaggtgtgtcttagcttctcttctttgctatctttgatcagatgagtaggcccgctcagcggagcgaacgctatcggaaaagacttcgtagactgaaggacagacgatttcagccttggaggagaacaactaatgaccgtgaagacatcggtgactaacgcatatcttcgtgttctcacacgaccgctatcagagactggcgcccctgtcgccaggcatttccagccctcctcgattgacgattcccgatctagtacgcccataggagccgatagtactggtaaatcttctggccgggccaagtttggatcgattccaaactgggatgtctttatgaacaatcccgagttcaacgagtttgacgtccggaacggcggggtcaagaacttggagttcgcagagggcgacgtgggctctaacaagtttacaaagttttactactatgttataaccaagagtatcttctttagatgggcgacgtacatcattccagttctgattgtaagcgcatacttcattctttccttgagtggtcggtatgcgaagtatcctgaagctaaacgagttcactttctgtaccgctctcatccggtggtcagctcctttggatccctggaatcatttggctcaccgctcctaccggctcatccttagaaaatagcgcctacggtttgtattgatcttcattcctgagaagtctgcttatacatacttaatttttaccgaacgtattattgactactatttctttccattttgtgcagtgtggggtgtcaatttgctgtggtggtcaatttggctaactgtggtctgggtaagtccattatatatacacgcggactaccgcatgtctcgtgcgtttccattctcctagtatacttcgtattaattggctttactttctaattgtcgctgcgtcgcatgaccatgctcgggattgcctataggttggatggtgggctgttagcgcgtgtttcatgatccttcctcggatcctgcgagtgactgtcgctgccatcgtggtcagtcttgatcgcctctcaaatggcttacttctcagaagtcgtttcgctcatgtctttctcggttactttgtcttttgcctccacacagggaggtgataagtcctgggtggagatggttcgtgctgtgagacggcctttatccacagtcttttggacgctccttctgtggatcacgttccagcctttgatctcgactcgtcagaaagacggaacctcatcttctagcgcttccgcgttgactttggtgagcataaggtctactctcgtctctatcacactgacgagctattcggtctcatcgcactctttccttcttcttcgaatgttgattgaatcgctcgtaaaaagatctccaaaatcctattcgggatgttcctatgtacttgtgttttggcgggtgaaaaagtcatcgttcagttcattgcttgtatgtgacttcaggtcgaatgcttgtttgcctcgatcctgtgtgaaaacatcctaataaccgtattaactcttccttcagataccttccaccagcaaacctacaaagatcgaacagagtaagctcaggcaacctttcttggtgtctacataaaaacgttattaatcataacacttgtcgaacatttctagccaccaagatttccagatcaaagctttgactatcctctacaagaactcttcggatgtgagtttgggttcggtttttctcttttcgccttgttggtaaactaatcattccaaacatgttggatgttgaacgcgcgtgttaaatagatgggccgatctgatacactcaagaactacgccccgtccaccaagagcaacccagtgttggctcctcagatcgccgttcgaaaggccctcaaaggactccgaaatgccgctgccactacgaccaacgccttgggaaatgtggcgacagagatggttggttcttcggtcttgcaaccaaactctcctcaggctatggtcaccgcctctttgggctccgccaacaagacccgagctgtgagtccagaa

SEQ ID NO: 3148 - DNA, 1663 bp, Xanthophyllomyces dendrorhous
ggttgtcatactacaaaaaagctcgctcgaaggatctattactcgttccgaatgggcaagaccgaggtcactctggctgacatcgctcgacattttccggatcttgacactgccactcgagctttcgagatccttgatgctgacttgaacgggtaagtccgttgtccgcatcaatccgatgggaaatcttcgatcgaagttgccgccgctaacacttatttgaacgttcattttatatagtggagcctctcgggacgagattgagatgagtctcggagagattcacagagagcgactttctttggcatctagcatgcgagatgtcgatggtgctgttcgacgactcgatacgatccttgtctcaatcgtcttcttgatctgtgtgcttatcctcaccgctacaatcgtacgttgatcactttactgccaatcttcttcccatcgaggtgtgcacgccggatgctgagtttatttgtttttctcaatcgcgcaacaaagacgactgcactcacctcgctcgttacctcggctggaactttccttttgggtctttcttggcttattggagctactgcccaagaagtgcttagttcttgcatcttcctcttcatcaagcaccctttcgagtaagtgacatttttgattgctttagtaatttttaaattcagactcctcaatgttgacttattgtcgtgtatctattctcaagtgtgggagacagagtcgatatcgattccatctcttatgttgtttcggagatgaaccttctctcgaccacgttccagcgagtcgatggaaaatgcgtctttttgcccaacaatgtattgaaccaaaaattgatcggtaggtcttttgattcatccctttgtttcataaaatgctgaagatctatcagagagactgatcggatgatatgtttttatagagaacgttcgacgatccggccctacttctgaaacttttgcgtacgtatggatctcctatggccattcaacctcacgttggcgctaactcgtatgactatgacctcggtgatattgtatctctatacagatttgacgtcgctttcaatacgtcgttcgagcatatccaggccctccgagagaaaatgctcaagtttttgaagggagagaaggtaggcacttcagtccactacctgacaggtctgaagcgtattctcatttgtctgatcatctatgacacttgaatttggggttttacgaagagagactttatcccgagcttcgacgtaacaatcgtcgatttccctgatcaggcaaagctccagctcaaggttagtttgtttccgttctgtctcgtcaataaatttaatcatcctgatctatttcgtcgggtttcttgattttgcttcccaggcaaacatctgctacaagtcgaactggcaggtaggttctctttctatatcaaacaaatgtacggagggggatttgatctgatatcggatctctatactttcttattcgatctttatagcaagggcttctcaaagtacaacgacacaataaatgggtatgcgctttgaaagaagcgctcaaggaattgaagatttacggatccgccggagatcccactccggatccagtggtgcctatcgagtagtaagtctcctcgacttcattcagaattcttccacgatgaaacc

SEQ ID NO: 3149 - DNA, 38278 bp, Xanthophyllomyces dendrorhous
ccgatcagccaaagatctggcagttctgctcctacgtattcttttgttgaccaaagaaacgtgatcgctgatccggagtcggacgtgtttggagaggtttgtgtcatcctttctttttgactgattatctgatttcgcgcttggaaacgttcggaatcggactgactcctgattctctctattttcgtccttgaaacgtgaacaaacctgtaggagacggcaaatggcgcgggacctgagaccgaaccccccactcgagtcaacacccctgctggtatccgacctgttcggagacgaacaggtgacgtcgaaggacaaatccaagacgaagtcatcgagatgaatcagaatcctaacaaagctcctcggctttgagtaagatctttgtctgcgtttttgtcgttccatctttgctcgactcttgtcattgcatcattagatcttcttcgtcctggactctttttcagtttctttctatctttttcacgtcccgtttgtctactaaagctgttatatcccgtcattcactcttacgaacctctctttactcaactgtcacgccttctttgattcgcttagacgtcccttacgcctttgcgcctctgccattcatctgttgtcatttttggagctttccgccctacctatcattttctctgccttcatctgatgtcccacgagaaaagtcatgccgtctctcgtacctcggctcttcgtcttcttcccccctttatttcttctatataaagatctctttacaaaatgcctctccttttgctctctattttctgcttgtttatcgtcttcaattgcttgctaatcaatgctatccatttcccgatgattgagatctgtcaatgaggagatgggatcgttgttgagaaggctgacaaagttggctggacgcaggatatacattcaaacaatggatgaacaagtctgtctcgaaggagcctctcagtatgcctcatgatatagcgtagaagatcaagtctttatctcaagcccatagaccctacgagcggtctcgcccatgatctctcctgcgctgactggatccaacttcaacttggcaaatacttttagcacaatttcatgccaattcttttcagactcagggacgagcactttcgatctcaacgtcgaggtcggagtcgtctggtcgagtgatgtagtttgaggtgtcagagcgggaaatggatcagagctggcaagaggggaaggagaggaaccaaagatgatgcggtgagagccgaaggagtcgagtgcagggacgaggtatgcagacagaacgcttttaaaccgagccaaatttcgggtcagtatcgttcctcgcaacgaggacaagtggacgatgaggttcagagttgagattcaaacatctcgaaattattgaatacgtccacacgaggacaagaacgtaccttgctacactatcttcatcctcccaccaaggtctcttgccactcgaagattgatattcttccagaatgatggaaggaggcaagaatttaagcaccaagcctgggatcaaagcgagcgcagtgatttgccgggtgtactcttgatagaacggttgatgaacaagcatcgagggtgagatcttggctggtagaggtggggggagtagatttgctgtatgtatccatgtagagaatcatttgaatcagttgagacggttgatcagatacagaattgtaaaggcaagtcattgagccgggatacatacaaagtacgaccgtcgtgcttcctgacgaagacttgacaccgtcgacatcctttgcttcctcctgaccagacgactcgcttttgaaggagagttctctagaaacaaggacgacattgtctagtaccttatcaatttcctcccaaatcgattcagtcaactcggatgcagtgatctcgaactctaagggagaagaggaaacatcaacggagctggttgaagagtaagggatagagtggatggggactgttcggagctgaggagatgaagagactattgttgtaggctgttctcgagattcatttctgttgaactcaagagtaagtaagttcatgatcagtacatttctttgttctttctcatacataacatggtcactaaaaccgaaggatcaaaaacaaacatgctcgacatgtattctcaagatcagaccaagctcctgataactaacctagtgattccaatgaaacctccaaactttcgtcctccaaatgaactgggagcctgacgttgagactgtctatcgagatcaacatgtccatcaatagtgagtttgcttcccttcggctgttgctcttgagcagaagccgatgtagaggtcgaagaggatgagaacatcgacaaggaaagtttgggaggtcttgatcggggtggcatttgtatactttgggctatagagatggagtaatgagatgggggtgttatgagatggttcagcggaacaaccaaatgtcatcattgatgcaacgggtttagatatcgttctcagcctctgaagggttgaatcatcatgctgcttgtgtatataaatatcttgcacgtatgggatctctaggctctggatacccattggaagtctctttctctttcaccgttgtaaaaataggcaagttctgaagacaagtcatcatcatctcattaggtctttctcaaactttatacgagacagccgtgaaccgggggaaagtaacgacaatgaagatgtttgcgatggtggtgttggctgagttggagatgagcgtatcgaatgagacctgggcttatatataatcacgatctgtatcatcaagcgagcatgagagtttcgagatgtcgttagagaccataaccactcggcggtacgacaacagtagagaaggagaataacttacaacgacggcaaagatcatgagtagcagaaacaggatacatttccgcctacccgtttgggactggtatcgtgtagcaatcttcaattcttcgacggcaccctcagtctctctagctacgacttcgatgttgtactcgatactgtccatcatagtaccctgctcgagcaccatatcgcccaaatctcggaacaaatttgcaagctcagtgattgactgggcgattttgcttatttcagcctcccgtcgacgaatcgtcttgtccaatggaggtccggccgtttgagccagaagttgagattgagactaatcacgatcagaaagccggacaaaggaagattctagtggtcagcagagggtgcttaactgtattcaagcaaatggaaacgagtcgtttactgacagcttgtaggtcgtcttctaactcctctattcctcctgctcctgctttactatccccatccaacatgacccctgatgctctcatcagacttgcgttcttcgcggcatgcccttgaagtctctccatgtatgctctctgctttcttctaaatttggcgcttagatcctgcaccttggcagccaaacctctctggacattggatgcagatactagatcagcttttgatgcttcacccgagggctggatttgctttatctgagcttgagcttgtcggaagtcctaagcgagccaaacaaacccagttgagaaacgatgccctgtttgatgaacgctcgggcaaacaagaaatagaaaagagaataatccgacgcactctagtgatggattgagtgaggttctcgatgtcgcgctcctccgaagacctatctgtgaatccaggcaagcagtgcttcgcgtgcatcttgtccagcgttgaagctgtagatcatgtgcaagaatacgtgacagagacgagcagcatatcaacgggatgctacatagaagcatccataaacagaaactaactcttctgtgtgatccgatctaatatggcattgactgaatccgaagtatcaaccctggtcaaacggacacacgacagtcagccttaacgtctgcctgttgatctcagcacatcacagtgatcgatgtctgaacggcctgcaattgagtgtaccggggaaggacgaaccacaccggtgggagccccttttctctttgttttcctttgtagttcgagttcttgttcgtaagaagcccggtctcttcgtccgatccctggtcatcttggtcgtcttgttctatcgggcgaattgatcgctggggcccgtcttgatgatatccgaaagaagaacgtatagagagaaagaagagagttcttgaccgagatatcggtcttcaacagacagacaagcaggcaggctggttagtctctgaccaatttcattacaacacacgcgtacataggagaaacgaacactgaggacgggagtgcggatgatgatgatgatgaagctcctatcacacctccggcgaaggttgcaacggaaggtgcagtgggagatccgaaccgatccatccgagagttccagctgagacgatgcttgtttctctctctgttctgagagcagcggacagaacagatccaaagaacgatgagcgatggtatgtgtatgtgatcgtcactgaacacttactcactcactcacttacttgcttgcttgctgatgatgctgatgtctcatccaaccgccagcttacttaagcacgatgccgagagataacatacacgatcttttctttctctttacccacgaaccatcatgactcctcttgggggactgacgatgacaaggatagattctgttaggaagttctgatccaagaggagccaacttgttggaagcataggcagccgttgggccgaatgtttcaagtctcatgaagttcacccctttcttcttattctatcaattctatccctttgatcaccttgaggattcttttgtctgcctctgtctctttgttccctcgtttctcatcctgatcctttgcagttgggtctgttgaactgaagactgatcaatgagtcctcatcatgtatcttgctgaccatttcttctcccaaaccaccattactgatcactttgctcacacagccatctctcgtccggacgactatgtggactccaaactacacacgtccaactatcagtcctcgtttctcagcgcatagaacgaatacagaggacataccgttcgatcgctcttatgagtataaccacctagatatgcagcccgtggatccgaatgaaaatcccttgaacactcatcttgaaaaatcgcccgcgcatgggacacacgcttcagtcggagaccatcttccaccttacctgaatcctcctgcgctgttggcgctcaatatgctctcgcctcccgtactggggataatcattgctcttgtcacgctcctagttttcaagactcagaaccacagcatggtcacgaacgccaagaaggagatcatggcaggctgtcttgcagcagagaaagcgctgggcacactcgaggccatacccagcttgctcgaggaaaagagtctgaaagcgacagcgaaagcggttcaagccagcgtcagaggggttggcaaagggctcgtcatgatgtgagccagtctttttctgtactgtttcgtatgatcatcagtctctgttctcgatctgatagattggtcgtcacttttgatttagtataacagtattggaagctgtgatcactttcctgatagacacgttcaggtctacctatctgtgctgtttagagctcgtcgtgttcggaggtctagccttgatcatgtttgccgtctcggaggtcagtagactttgcatatcagatcctcagcagctcgagcagatacttaatacctataccctacaaccaatagatatccgacgctgtgaaatctgccttgaatactattcggctcttgatacaatcccaagtaaccgcgttcaacactgtgactcaagcagctgtaaaaagcatcaattttgtcaccaaacttgttgtacgtggtcatttgttaacttttttttttcaagcatttaaatgactaacgttgagttctactcatgttgttttatatctggcaggatgtgaccctaaacgtaaccgaaatttctataccggcgctatcccagttggagaatgtcacaattggaaccactctagaggccgaactctataaactcaatagctctttgccaactttggacgacataagaactaaattggatgcgttgttagtttcctttgttctttgacctgagcgaaattcttctccgactcgtgagcacttagatttctcgagtcttctctgatactctagtatcgaccagccgtttgacacaatgatcctcaagatcaatacgaccacgtctaattatacgtttattccgtcttcccggacggctaacgtgacgtctcttgctgtctcgtccgcgaattcttctgccgatctctgtaccggattggatctgacattcatcgacgatctcggacaggacctggataaaattactcaatggggtgtgggtattttggctgctcttgggtaacaaacgctttgtcattttctcgatctttgcgtgtcaagagatgctcatgttcccttctctcgtacaccccagcgtgatcttgatagctgtcctcctgtatcttgaacgtcttcggtacaagtctatgtcagaacgaattgatctcttcaaccaatctagaagtacccttgagaaagggaaactatacaccgacgaagacttgatggaactcatacaccttagtcaaaacggaatcgttactgtgtggacttacaaaggattggagaagctgagaaagctgggagagcgcaaccaaagaacaagcaagtggtttggtaagttgatcgatttgctttgtacatatagatatgtttatttcatatctcgttctataaacttactgtatcgttctgtatatctcggaaaaaaaagtggcgctcatcacccatccacttgcgttgatgccactcgcaatggggatcatcagtctcctctccattcaagctcaaatcgcagccatcgatgccattagcaggtcagccgaagagaccgcgaatgactctatagattctatggcaaattcgatgacctcaaaactgaacgctagactggcggagagaggcttaatattcgcgaatgatatcaatgaggatattgcgcaggttcagacgttcatggatgacgagctttttggaacttgggttaacaccacaacggttgtcctcaagtgagtaaattttccttgatcatcaagtagacccatatacgctaaaatcatgctgatgttgttttctctctcttgggcgtctcccatcatagcgagacacttgtagagttctatgctctcgttggcgaggctgtcaatgtcacctttggttccactatcctctccggaccgataaataattttctatattgcatcgtaggatccaaagtcgaaagtctcgagaaagcgctaacatggatcaacgagaacgcacatttctccatatccacgatagaccctgatctgtttgctatatcgaacgcgtaaaattaaacttcactccctaccttatcgtcagtcgctgtttctaatatggtgtgatcctttactttccatgacatagatcttcagatgctctagttcgtcctatcgctactgcagcgctagggtcttccgatgatccttctgatcctggagttgtccaacgcatgatttcgtcgtataaaaagtctcttgagacatctcggattcttcctttcgttttcattggcctttgggtgatcgtcttccttggtggtctgttgactatctggtggacagcacagctggaacttcgagaacaagaacgaacatatcggaccgaaaaacttccttcaactcgacatttttatagtgccaagagagcggtgaacgaatggctcggccggcgccacgacggtagagatgaggaaagagagagtttcgtattgtctgcctcacctgtacggaaaatcaaaattttacgggaagcgttccagtcttcccctgtcaaaatgagtttcacccggcgcaactcaatcaatatcgaagaagaagatggtctcaaagatggatctcttcctcgacctcttcctcaaattcctacatcccaatcgcgacagaactcgcacttcgacctagaaggaggtcagccacgagattcggcctatgcttgggtttccaggtccacagggaacgcaatcgtagatggaagagccagtgctggtccgtccaagagaaggtttcaggaaaacactaggagtcttcaaacgatagaagaatcaaaggatcctgttgaggagaatgattctcttcgcctgacgttgcatccggatcattctctgctctctcctcccgcatcttcactaccaaatgctcgcctgatggccaatgtcgtggtttctcctggagagatctacccatttcagtactcaggtttcctttcagctcctcatgctcgatatggtacggccatgacaccaacttgtgcaccagccaccaaaccgagcgcactggaatcgcggacgaacagactatcgagattgacttcgttcgtgccagttggttcgagagcaggggcgcattcgaactcgagtcgttccaataacatagaggacccattccggacacctttcgatgatctggatgagcaatcaacaccttcccgcacatttcattaccacccttaatttcctgtcttcggagtctatcaagtgattgttatagcattcgtaacctcttatatgtgattaaagatacgttcatctcgctgtgaatagtacttcttgtatcttgtatcttgtattctgtatggttaatatgaaggaaccgttctcaacatgcctccggttgcattagcactgtccaatgaacataagtctagaggaagctcaccgacgagttcgctatatatcttcgctgaggtcggcgatgagcgcgtctaagtagttgtcaggcttatgtcattgggattttgaatatttggccacataattttctttacccgactgaagacaaccaacagaccatcacacgccaaatcattctcattctcttctcttcttccagcatcgttcggtggttctttcgtgccagtcatgggtgtctttagctggttccagaaagtaggttttcgtctatgtgttgaccagatggctttcgattatatttaaagacgatttctcttctcgtttcccgttcaacgcgtgctcttttgccgctttttttttagaagccggagctcgactacgagaccttgctccagactctgtcccaatccatccaggacaaacagcagcatctgtccgagatcaagctcagagagcgtcgttcgacccttctggttaccttgtacctcattggcttctggattctctacgcgttgctctggtggatcgactatctccctcttgggttgatgggcttcaacagtcaaccggatgagtgggagtcggatgacgaacgaggtttggttgagtcgtatggcgggatcatcatccttgctcttcccgcattcatagggcctatcgtgtatgtttctttctaggtttcctcgtactgtgtgatgtattagctgaggaaagttgacaatcaaacactttgttgcaaacgctcacctgtgtcgaatatgatagtatcatattcataagacgaactgtgaaagcctggtacacccggcaggagctatctgaaggtaagggaaaccaaatacgatccatcagtctcatcagcgtgttgattgactaatcgaatgtcttcttttttttttggtacttctccgaaattcttgtagaaaagcaacttcgtgatctacgagcaagacaaagaacgacaattgaagagatcaagaagaaaacaaactattactccactcgaaaccttctcgaaagatacgacgaagctccttcgcctactgccgccaagctacaacaacaacaacagcaggccaaccttcgcaaacgaggcgcgtttcaacctcctgttgatcctcgattacaaccttcgacgcctggatctccttcacctaattctataaaacccaacacaccctcggccgatctcatcggtacacccatcaacagaatgaaccctcagacacctctttccgccattggcggacctcatatgtcgtctgctctgtttgcgtctggaggaatgcaaccagtcacccctccgacaccgcctcgaaagacattgttcgatagagcggcggattatatattgggggacgaagctggtggatcgaagggtgatatgggtaagtttgcgctagtctgcggcaagtgcttcacgtggaacggcctagttgaggaagctcggtggggtgatatgcgtacgttaggtctctttcctatcccaagtactaatgataagcgataatacatccgcataccgttttagcctgaatttataattgcttttcatcattcgtttgaacttgctttatctatattcagaatacgtctgcccgaagtgtggcttcttcaatccctctcctaattcactttctaaaaaggatagcaaccccttgaatgcttctttacccgtaccgcccatgactcgaacgaggtctacgtcacctctggccgaggagcttaaatcgggaccgacgacaccacctgggaagacgaatgcgggaaagacaagaaagggaaaaggaaagaacgagaagttggagactacgaaggatctgtagccgggcataggggtttcgttctcaccaggcagctcattctcaattcttttgaacgacaaaaacgatacaatgaaccttgactgatttatgttacggttaagggctctcgctatcccaccagagtcgaaagttgatttcaaaaagtatgagaaatttggaaataaaaagattgagatcattccatatctacatctccgttcgacacctttgccgagcgcaactcattcacctctacttcttcctctcctacgccctccaacagtctagcgagttcatcatctgccccgcctccgaagaaaagtccaccatccatctcactcaaagcaaaatccaagacaaagctctcctgcaccattcgctcggctctgtcgaaatacctctcggtatagggtaccaaacccgcaatcatctctcccagatcaagcgtgactttcggtccgaccgtcggtttcttagtcttggcaggcttcttatcatcttcatcctcgtcctcgtcattaggttggttagcagtagcagctgctagagcagtagcagtttgtgcggaagccttggagaacgattggacgatgtcgtccataggtcgaagtctaaagatcgcatgaagaaccgtttgtgcgacaggtgatgtctttgctctagcgttccaatccctaatgtgtcctaaaagcttgacgagttcgagaggagggagagttttgaggacttgatcgacagcggctgaaccagtgatactgagtgcatctgaactctgcatcgatgtgaaggaggacgaggaagaagtaagaagggaagcagtaggaggcgctgggggtcgggaggatcggacggtagagaagagcttgaagagtctaccgggttgagacatcgacaaagcgaggaggattgcattcttgtagtctttcaaagcgacataattgtggaagttctgctcgctatttgcgataattcaaaaagaaacagagcaattgattgagtgactgtctcatcgacagatccgcttcgagagcttgagtttttgctacttacttgacgatttccttctccttggcctgaatcttctcttcctcatcggcctttgtgcagtccgtccagaacgttacgaccgaatcggccgctccagaaacaattgtgctttcgtcctcactcacagcgagcgcccagaccttatcctcatggttgtcgaacgagctgacgcattcttcgtctttcacgttccacagcttgacaagaccgtctgaggaggaagaaacgagctgttgaccttgagacaagaagtcaactcggagcacagagtttgagtggccctcaaatgtctgtcggaacaatcaagaacaaataatgatagattcaacagaacgcactttagatctggaaaggaaaaggagagaaccaaagacagaccttcaaacacgtataatcgtccagactccaaattctgaccgtcttgtctccacttccagtagccagaaccctgtccgttctgctaaacctcacactccagactcctcttttgtgtcccttacatgttccgacctgatgaactccacctgtggctttagcgtctgttcccttcttgggcgcagcatattccacctggaagatcttgacagtcttgtcctgcgaaccagaagcaagcaatcgatcgttaggcgcgagatcaagtgagttgatatccttgtcgtgaatcttttgagtcaggatcgatcgaggtttgtagacctcgcccgatgattcaggtgtcgaagaggaggaaccatgaatggatgtgtcgagagcagagagatcccacatcttgatcgttcgatcttgcgaagcggtgaagaggaactttgcttttcctgacgagtcagtcgcttgatctgaaggctttcgagagaacgcgactgctccaatactttctgcatgtccttcacatacggctacgcatctccattcaccttcgtcattacctccagtggcagacgacggggaagggacccatgcccagattcgagcagttcgatctttgcttccactgaccaaccactgaccatccttggacttgtctaggcaaaggaccatgtccgagtgaccggcgagaagtcgagcgtcgaacgtcttggtggaataaactcggatgagagaagagttggtggccaacgcaaggtgggtatcccgttcagcaggattaggggaaaggaagagggaatcaatgatctcgtcattgaagccgatgagctgacgagtgattcgagaggtggagagagagtggaagagaatattttggtctgagtgaacagagatgagagcagatagagtggagttaaatctgatggccatacagaataaggcaggagaagttagattatcgtatgaagctcccgcgtaaggctcaattcgtaggagagaaataaccccaaatgtcaacttacagcacgtcaacaatgcctcgctgttctccctcttcagcctcgattgacccgtccaccaaatctactccctccgcacccttcaagactccaacttccgttcccatctgtgcatcccagagtttgacgacgcccttttcacctgcggtccagcaaatcaacttgtcgccgactggtccgttcaatcctttgacgattgtgtcctccgagatgactccgacagactctatggattccaatacggtgatagttctgaccaactgaacgtcaagtgcctttccttttcccttcttcgcagcggatcctttcataaagagacgttcccaaccgtcgtctgcgcctccccatagatcccaaacgaggacaaccttgtctcgtccaccgctaaccaaccatcgtccgtctggactaacgcccagtccacgaacaacgcttacgtggccgtctagcacggctctcggtctgcctccgttggaagaagactcactcaagtcaaacactctgacttttgtgtctccacaacctgtgataagctccattcgtctgccctttgccggcccggatcggggaatattgaaggcgagcgcagagaccggtccaccgtgggaacggaagagatgagtgacgtatcctccagtgaggtcccagaccttgacaattccgtcagcagaaccggaagcgagaagtgtcgacgttgggtccatggcggatacaagaataggagaagggtgggatcgagcggtttgtcgaagaaggggaagggagggaggaagatgaggaaggtgagcaggcggtggagtgaacggttgattcagatcgtacagccgtaaggtaagtgaacgagtaaagacggcaagtataccagttcgggagatagacattgaagtgatgtccgtggtgtcctaaggatgcaaggcaagaatcaagcaggtcagcttcctaaatatcaggaagggatcaaacagaaatacgaaaagaggcagagacgaacaccttgaactcgagcaagtttctgtccagactcgacctcggtgagaagaatgtcctctccggtcgtactgatcatccgaagtccatcggcggtgagaaggacaggaccttgagtatgcaatggggatatgagccgacttgatcgatagctagagaaggccgtggattgacgaagaccaccatggttgtttagcgtctaacattagcgctcgggcccagaaaactagagtgaatccaacaagtcatgacctcacctcgtcttgaaccctggcttggacagtggtctggtgtccatgatgctgagtgatatctagacgtgcaagtgtagctgtatcgtgtcttgttcaaaggtcaattggtatgagaggagatttttttggtaagttgcattcgaaaaacgtaagagtttatggtttagctaaggttttcgaatattataaattaagcttgcacgtgacttgaagcttacccacatatatcgcactaccggcccgatctaccgatctatctatcctgaacgggaggacgtcgaggatgccaaaagagaaagcttcctcaactaacacccagaaggttgagaagacattgcaagaacacgaacccactcatcctaaatcttacaagctaacttaaccactttgaagaggggcagaagaaagacaggagcgaactagggaaaggagcgaaagaaacgtaatcgttcgtacaatgatattctcatcttactttctcttgtcggaccggactcggaagactcctcatatattctaatgtgttgaattttgcatacccttctattttctgatgaaggtgtctatcaagccttcctaaacctaggtatctctcgtttcgtgatcacctccagttagaatcctcccaagaggttcatctacaaagacctctgatggatcatcctcccacccaagaaagtagctttcacatagctgccggccacttggacttcaacaggccgacagaccccgaaacacaggtgaactatgttcttcttgtggtcttgcttctagtcgatcgcgcttcttaagcttcttacgtgcactgactataatatacctgcttgatcaggccgagagagacaaagctaaaagagcttaccgtgcatgcacaaattgcagggtctgtcgtcatcttctctgttcaatatctcaatcgatcgccagacaagctgagtcataagtctgggtttattttcgtagactcgaaaggcgagatgtgacctgggagatgtcaactatccaaaggacccgccttgtgccagatgcaaacgtgaatctgtatgttcatcttgcttcgattattcagtgcacatgacgtttcgtacactcgttgcattcggatcgtgtcgtgcgctgaaatttgatccatcctttggttgcgattgtgctgctctaatctctcatagaaagaatgcacatttcttccatctcggcgaggcgggaatctgacaaccaaagctagggcgaagtccttcggctcacatcgaccatcacctcccatgaaccctgttgaaccatcaggattggcttcgacatctcatcttccacagatgagtctctcatccacaaccgaatccccttcagcgaaaagacagagacgtatatcgttctcctcatccgactcgatcaaccggccagaagagtccaggtctcccaccatcaaccctatacatccatccacttctatttttccagcgtactcgaaatctacatcaatctctgttcatccctccctcaatgagtacgcatatccacaactcagatctcctgcgtcatcgacaaacttcccactaggtttcgaatctcagtattctatgatgagttcacatgaatctcctaggaatcaacaccagggacgagcccacccagccatccggtcttcctcgactgagacactcaatacagttagctcaaactcgggaatgggctcagtttacggacccaacgctccaccacgtcagccttcgtatactcgggtccccaacacaggtacttcccaaacatctccttcatcatctggttactccagacctccgtcagatcggccagatatgtcgagcataccatcacctcagcctcgatatctacaatcctcacgctcgatctatgcacccgtactttccccctcgcaatcaaccttacagccacatggcggtcatgatcgaacacactcaatatcctcttcttcggccgacatgcaacccagtgctagtgttatgggtgaagctcgaacggatcaagagaatttcattaccggaggaatggccaacgaggttgatgccttgagtctgctcgctagaacagcgactggaaagcctacttcttccaaatctgaacctggaaccgcttcagaaggcaaggacagagaaggcttattgaacactaccggttcagaatccggaagaggaattgaacaagatagatcagcaaaaagggaacgagatgatcacctgggaggtcagagaggtgaggaaaacctggccgacgatgaatttgtctgtgatttagtcaagagaggatgcctcgactgggagtcgatcaaagtatacgtagatcaattcttcagcagacatcatcagatatttgtaagtcactttccaatgtgcgacgtctctcaatcgtatggtgccgatgctcagttcgaaggaaatttaacgatgctttccaatcaaaagccaatggtaccttcctcgaggattccgaaaacgagctcccaacttcgagtttttgcaaaagaagagaagcaactacttgcgaccgtggtttgtatagcgtctagatacgatacgtcacgtccagaaatccacagactcgtatgggaggttatatctgtgagtgattctcccatgtgaatgactgtttatctacgtgaacaccttgaggtagtaattgatgccttggaaaccaccataggaatacattgtcgacaccgtcatctacggccgggacgcttgtgttggattcgtcgaaagttggtctttctttccagagttttgatctgagtgtatcgcgcgccgacgttttgcgtacagaagagttcagtgttgacggatttacttcttttgaatgcgcgcttatcttaaggtatgctcctcctctcggagaatgtaccaaggccaagcatagggaaagatgaccaaggctcaaaacagtgggatgaatctagttcgtctgatgctatctctcttctttctacacgtcttttattcttttgggtttgacttgaaacatcaatatctggaaagacgtaaactgatttctttgtgatgaacaatcatcagctcaaagttggtatctagtcggacatgccgtcaggtcagcacctctcaacaagccccttccaaatcccgccacttgccctgaagtctatctaatcttgaacttccaacaatccctgcacaatagaactggatatctgttaggtttggatcaagtaagtctcatgttctcgatcatctgaagccgaggctggtagctatcttatctctaactttcatatatgtctacggttctatctaacgctagaaaacaatgaacatctcaacaaccgaggattcgactcctagcatagagagagacagactagcatggacatgtgcgtttccattttcctgttcgcgatctgtgtttataccaaacgccttttcgtcgtcttgttgacttctgatattcttcaatgtgcatgactcgatatcagattgttacattttcgataggcatatttctcttcgtataggaaaggcgttttggtctcgtgggcctggtctttgcgtatggtcctgattgttgtttcactctaagttggctctttgttccatcgaaagatgcgctgatgcgtgctattctataattttctgcagttcaccgaaaatatcgcttcgatcaactttccgtctcttcgaccaatacctagtgaacaggatgattttgcgagtgtcgttcaggccttagtggagctgacgcagacgatgacggcagcacacgacgtcctgtagtgcgtttgtcatcttgtttacagtcctttctagtgcgttcagatatactcagtgtctgatatgtttctgactggcatttatagtccgtcgcacgaccgaacgatgtcgttagtcagagctggagaatagtaagtcggtcacagtttcttttgcaggagccaagaataagtttgcctgatgatcttttttccatcctttagttacaagtacctagacgaggtgagttgagagtctcactggctctcgaatctgaagctataccttgaactaatctcgttcgaaatacagttctctcgatctataaatgcctttcatagcgtctggttgcatgttaagttcagcacttttcgtgagtctttattcctgatcagaagctttggcagcaacgctgatcttctcagtttgttttccttgctcatccgctgtacttcggaagcatgcgacgagattgtgtggtgcacgtttcattacattcggctatacatatacgtatttgcctttcaaggtgcctatttattctctgttaataagctatcggccctaagttaaccacaaaacgtctactcagcgcacgttcagagagccgtttccaagggaggagcagttcatttcggaccagacggtaacattttcccccgaggaccattggcaagccctgattcaaaattcatcatggagtctatcgatgctgctagacaactcttgatgttatgtaccgagcgcgtaagtcgtccatctgcgtatcgatgtcctgtaccgtaactttcagaggcaatcaattgatgttgagacaacgggattgcttcagcttcatccgggaggggctcttccattcttgcctgctaggttctttctgtggttcacatatgcaagcgtgttcttgctgaaggcgatatactcgaatgctgtaagtagccactgatcatcccaacatgggatacgaactttcgcgcatatcagagatacagatggtgcgtcgactgaccgctttcttaccttgacttctaacagatccttcggtcggatacgagaaacatcctcgagctcattcaaaaagttatattttgtctagcaaactcaagtcctgacaaatcacacttgggcattaggtgggtttcaatcttttcctccgaccctcgattttttgcatgactgatttgagctttcggtttatgtgttttctcaactcaggcacgctcttctactccgaacagtagcaaagaaacttcgacagtctttctctgatgaatcttgggtagctcatgtgaatttcattttctcttttgtttttctttctttctacgagtgtggggcgctggttctgacgtattcatctcctctgagccatcgcttgtatgtttgttcgcggtttagacgggcacggctacccctctcttcgccgagctacccgatcgattccgttctgctggaaggagcaaccgatctccgcccatctctacttccggggcagatggaccttcctcttttgttttcaactcatcgaatacaccatcaacttatttagctgacccttcaatgtcgaccactcaatacgctgaattctcatctgcgactcctggaatgtctgcttcaggaatggcctttgaatcgaaagcgagaggaacggcatgggatttcacgcatatgagtgaagagggaaatggaagtatatatgggtctgaagtcaactttggaatggaagagctggcatatctctcacagttgtcggatcttgagtaagcgtttgccctttcatttctcttgtgtcgtaaaaaaatctgactacaagatcttggattgttcatagtttgtcgtccgaaatgttttggacccagttggttcctatgcagcagcctgaaggaagtggaataccatttcgttgatcgtatgaccttgtccaagaacagacctttgtgggccttagatgtatgccatcgtgtaaagcagagataaccagtggtataatataatttaaaggtctgaaatacaattgacgtttgactcaaaatgggccaagcgagagaagacctattatcgcctctggtaacgaccatccgccctcctgcagacatgcccaaacagacagtcagctctcttgtcgttgacaaatcagcacaaagtcactcacgaggcttctgcttcaatccgcgcacgttttgcctgagctaaccgttcggcctcttggttttgagcggcgatctctggggagcttggaaatccgatgttcctacgaaggggtagttttgatcaaaaagaaatcagcagatgtatttacagaattagatgttgatgatcagaatcggagtcggaatgtaccaataacccggtggggtaggcggttcttcccaatcagctcgatgtctcgaattttgttgctttctcatctgtacagattcccgctttagcctctcagttctctcttctaaggattctcctctctggccaaatttgtatgtatctgaagattcccttgtctctttagagctggatgtcggagccggacttttccatcgagggccttgaggaccaggtggtagcgcgcctaccgcttcatagtactaaatcatatagtagagatcagataaagcatgaggtcttagcttagtttccatggataggaacagatacaattaaatgggaataacatacgccggaacaacattcgcaatccgtcgcatgaagttgtttacgttcgtccttcttacgaacaaccctgttgaaagctatatgcatatggatgtcatgagcaagcgtgcaggtttattgttatcgtaataatcttgaagaaaacttaagaaagagacaaaccataattgacgccttgattgttatctttgtttatctcaaactcctcattgatagttttcgatggcgtactggatgtcgagtcagaatggtaaaggtcagtcatttcttgtggctcgagggaagagaaggcagaagattagaagtgcgacttacgtagaggaatcggccaaggcatacctcccgttacctttgaagccggcgaagagagcagtcacttccttcgggttcttgtttctcaatgatttcaagaatatcctcttttcgtcgggtgtcattccagccgtaggatctaccggacgactcttatatgtcgtatcgatccagtcgctacccgaatcatcagattgtcgaaagacggaacccgagcgggagactgcttcagtaatttcaggtcccgccttcgtagaagctttgccctctgagtctgatgaatagtccactgttcgagatatatcaggattgggtacatcggcctctaatggctgataacagatctcgggcaactcatctacatctagttcatttttgaccgtgactctgtgttgttcatgctctagttgattcggtgatttccttttccggctctgatggtcccaattatcagcccggtttgaaggagtagaggtcacgatcatctgatcagttgatgataatgatctcttgacctggttggcacctctgtctagaccagtcagatgtacgggctgaacattctggtcatgaagaacaggctgaagtgtaggcttccccagccattttgtagtgcatgctgaagaaggaacacctgtatcttttgacgtgtcaacgagtggcattgatgtgcgtttggattctttcgttccgatcgaagtgatattaggcctcgagtgaatacctttctccggatgcacatcagacatatgatctccagcgctctgcctcactttgtgacgaacggtgtcaggggtgagatacggagtaatccttttccgatcatgaatggctgccgacacaaatgtcccaggatggatttgtttcgagtgaaatacatgaatttctgaaagacctgagtgctgggccgatgattctgaaggtttgttctgctgtggtgatttcctgaacgtgagtgaaggagtatctaggagctcctttttcactgctgatgttggtaaaagatttggtgtgacggttgccgatgatattaaagatgggggagagtggttgtgtgtgaaggacattggtgtattgaccttaggagcgctcgacgtctttgttgcaacgccaaatttgcttgaaaaggaatcttgactcgtgcccttggccttccttaaaaaacccgccgatgcgccgttgtctgcttgcaccttcactacttctcttcttttacctttcacgtcagcgccctctttcattgccaaacggttccttcctctagatttctccgcagcccgaaattttgtgagatcttgaatgtacctcgtcgcaaaactcgtccattcttgctttcttgatctatacttttcctgaagttgttcatgttgtgcctgaagagagcgataagaagcttgaagcgagatatactctgaagagagagtaacaggtgatgtattgtttgatgaagaggacaatagaggaacctcggcagtggagacaggtttcggaagatcagaccggccagggctggttcttttttttgggggggggatccgaaaaagaaccgagagaaaggtatgagcatgcatgcacgcaagctaatcatctggtatgaagtataaattttccgacacacatcaacaaaaaggagcggagagactcacgcctgatattctagcccacctgactgttgatctgatttactcctctctgcttcaaaggttctgccgtggtcttctatagttctaatctcactctccaaggtatcaaccctcttgaccatcgatgcttccctctctcgccattgatctttttcactgatcaattccaataaggcgtctacatgacgggtggagtccatcaacctcttctggtattttctccgaagtgcgatttcggtttcaagttgagtctgaagctgattcaacatatcgatactaggggacgatgaagtggaggtaaaagctgtagagtcgactggacggtttacactattctcgagggacaatacatgattctgcacagtctctagttgattttgaagattgtccttctgagcaatgcatctctgaagcttgtcttctttcagttttagctgtgtatgaccgaccgagacgtcaaaagggacatatgtgcattaattgacggaaaggactatatgcgcttgacaggactcgaacttacctcttgctttatgactatcacaagacgccacatcaagccagtcaccatcatttttcgaatgaaatcagaattggatcacggaacaacaagtgaacctatttgattcttcgtgatcaggttgtaaggaagttgagacataccggcatactccgattcccacgtctctatcaccccttccaatacaccgacatgatcggcagcagcttgttgtctagcctttaatagattttctatcagagacccttccatagttcatgagagatctgacaaacaagccagtagttcttttagtagttggttactagaaccatttagtgagagagataaagaaggtgggggtcgattgattgacatgtcaggaaaggacaagacagaaatcggagaggaatgcggtaaatggacggaacgcgtctttgcctgatttcttgacgcgttcaaactcgctagcccatacacccactaaccgccatcgactcgcgttgactagcttacatggcagactttacagatacacatcctcggatccctcttgactccgaacaaaactggcagaaaatacaagacacaatcacacagagtctgttacagacaatcgagtccaaattcgcctcgggcgagctcgatccaggattgaaggcatatgtaaccgagaggacgatgcaggtttgtctgttccgatcgtactacaatgacatgacaaaaagacttccagagagtctatcactgattggactgctatataacacatgcttattgaatcgatgatcgtttcttccagtggaaagaccagctggtacataatgcaattcctaacctgcgtttgaatggtatgccttatgaagagtatttggagagtccagagagtatgtcctgctttccatttgtacagctatacatccatccatccgcaatccgcctcgaatatcaaccgttgacgcagagttaattatagatacggagccctttgatgagtcgctcgacaggaagatccgatcccttgcagccgagaaggagcttatacaggttcaagtcgccgaacgacgggcaaaaacaccaaaagctattcgagcattaatggaagatttagtcagacggcagattgcaggagagtgggtccctctggaagaagaccaggcgatggatggagttgaggaaaataaaggtcagtcgtcatctactgagtcttgagtcttattttttttcttcttgaatctagtggtgaaggcgagaggctatattgactgggacatctgtttcggctccttctagatctgatcctcaacaaggaagaaatcgttcgaacatttgattctgcattacacaccctctcgtcaatcaataaggtcggtttttctagttcaatctagctgagtgtttgattgtgtttgtcagagactaatttcggttcgacatgcttactgttctgtgattccgaaactcgtagaacttacctgtatgtcccttgtataactccatactccctagcaaactcgtcatttgccaaacattgacttatttatcgtggttgtttttatccaactttagaatcaactttctcgtacagcgcaagcccaacaagtagcggaagacatggccctcctcggtccatgatcatatcatgtttctcaacagaattctttatttgtgtaatacatataccccatatatataccccgtttattttcctaagctctatgttgcatcgtgttttagtgatactcgttgttgcgctacgtcatgttgaaagactgatcgaagccccctgctaatttgtttttatgtggagtcgcctcaacatattcttcttattcgacaaacaaacagaccactcaaccagtccttctcctttccttcaaccaactttcccgagaaccgaagggctttgccttccaaccagttgacatctggctcctcacaaggcatctcctctcttcccggtacatcctctaactgtgccttcacgcgctctccttccttattaagttcatccaggaatcgctggactatgacctcgccctggttgactgaaagagagcacgttgaatatacgagcacgccatttggtttgagtagtcgaaatccgtttcgaagaaggtttaactgaaggtcgggaagggttgacgaaggagacgcggtggacagagaggctagaagagcagaggggaaggcaaacgtcggctggccattaggagaagacggagacgggggttcgattgtgatgtacttcaggatatgcgctatcgacccatcgtgtgtgcctggagaatgacgatgatatgagaagactcaaagtgaggaaactttggccgcgatctaacaagaagaaggagagacgtacattccgcgtcgaccagcaccttgtcatagggaacaaacaccgacgtgtcgatctgaccaacttcgatgcgccctcttttgaaagtttgaggaatcagatatcccttcgtcctgacttctaccttatcctcatcccaaaccggtcctctttcccatccggcccacgtctcatcctccttttcatctctgaccctctcagcatctactcctagtccaaactccttgcctctccagtaaacatttcctcgtgcgactcctatatcgaaagctctcccatccgcaaggaacaacctcgtttttgatccgtttcctagttttccaagtacgcttttggtgatccccaaacgagacgccgacacgtccacgcctgtaactgttcctcgacctagtctgactatctccgcacacaacgaaagtttcccgccaggcgcgcaacataggtctagcacgtggtcgtccggatcaagagagagcgcatggaccgcgacggccgaaccggcatcgagcgcttggacccgaccttgtttatataactcacaaggggccattctgaccgatccaggcagcctatagaactcaagctggggactgggtagccagctgataggtgtcaagtcttctggtgggatattaagcgcggttgatatttggagaggtgaaggacgggaatgggtagggtggaaagtcggatggatgaaccgtgatgggagggaaggctttgagctaggcgtcggacgattggcgagggcatatgtgaggagcgatgtataagtcgaagtgggaagtccatttgatcgtagaaaggagataaattcggctggaagtgttggaagcgacctattttgaatttggcaatgttctgagtctctcgacggtcgttgcgagaagtttaagagaacagattgagaagcacagggaagacgtacgggagagatgactttggactggctgcccgagcgctagagatcgccgatgtcatcctggtaagagttctattgagaatcaaaatggttcttgtattgcaagaaagcaaccagaacctcctactagttgattgtatgccgaggtcaactcaaaagaatataccaaattgatgtatagcgcttaatggagcggttagggttatgttgaacttgagataacatacataacatacatgatgtagataaatcatatatgtaaatattaattaaggcctgtgacgtatactcccgattatttctacaagctgaaacattatggcatgtgtgttaataaggagacaaccctgaaaacttcatagacgatcgttcacgaatctgcaaaagcgttggtcatcatggctacccgtgctctcaatacagcccagaaagttcggtcgaccataccgccacatgcttcaaccccgcctcctgttcgaccaacaacgcatatcaaccatatcgtttgctttggcctgggaaacttgacgcatccgagaacccggcattcgtctgtataatgtctatatcgtatacttgtattgaggtcgtacaactgatctgagcttcagtttttgtgctaatccttagcttaggacatgtgattgtcgactcattccttgatcgtctagggctcggaatatggaagaaatcggccaatctgaaaagtatgatagcagaaggaagtctccctttaccagatcatgtcgatgccgcttctgggcactttgactcggtcaaattgacgttggtaaaaaacagtgcgtgaatatgatcacctatctctcatcctgaccgcctgtctcctcttcgttgtgttcatccgttctgaaggaatgttgtttatcggcgccctctttctagtcccaccgatgaaccttgcaggtcaatctcttcagccgtttctcaggcaaaatcctatcaatcggtccacactctatttcttcttatatgaccatcttgatgcagaagaagggaagattcaaattagaagaggaggttcgtgtggcggacaaaaaggaatgaagagctgtttaggtgtgttgggcaagcacgataaagaaacatatcagatacgggttgggatcgggaagccctcttcagtgcgtatgaatcatgatcgttgcttgatgttttgaccgacagagacaagaggtgagctaacacgtttgattgttgattaactcagaccgacttcacagccagctacgttctctcgcgctgcactgccccccaactgtcatattttcgaccggatggtgaaggaacgatatccatctggaactccattctcgaagcggcctatccatctccaggttccgacaagatagtttctgtaggaaagaagaaagaagatatgttacaggcctcggcggccaaaaagctcaggaaggaagccaaggcgcaaaaggatgcagagagaagaaaggctagggaagccgaagccacgggcgagagttatagcggtagtgagggagagcagcttatggatcgatcgaaaagctagcgaatatagttcttttcaaaatagatgaacacacaccgagtgtctgttcgtgacagagcggagaaccaacgaaggaacttcagaggagtgatcgagcatcttgtgtgcttcaaggctcaatttggtcttatcaaattcttcatattttcaagcgcaacattccctataggatcttgagtagctcatagaaggacacatgatggaacaccagatttcatacacgacgtcagaacacaacgtccagcatcagcagagcggatacaatctacagtgaacgttcattaaatgaatacttgaattgtttcttgaccgcagcaaaagaaagttgttctgtggtccaggtgacctcacctgctctaggagttttctcacgtggagcgagtgaacaagatcattacacggcccatcaatctgcgtcgactctgctcttgataagagatatcgggaaacagcttctgatggatcactcacaggctgaccagatgaccagtgccaagactagaacacacaatcgtggatgatgtgtagatacattcactcggaatgtacattcggacggcggaatacttagggattagatggatttgtctagaccatggttctctagatgttcttcccaacatcgttgactcgggtttatcgcttccgaaatcgtccaaggtgcctgttcttgactcaatgctttgaatcacagaactataagagcacatcaattcatctgtctacagtcgtcttccatttctcgtcgtttctgtcttttttcaagtctgacaatcaggaagaagaaacacataacttgttctttaaaaacactctaatatagaatctccacacccgaaatcgaagtactcaaagacatgaacgagaagcacgacgatccgaaggcggagattaattacatcgagaatgcttctccaggtacatctccactcgatgatttcccaggaatcaatgatatcgatgagaagaaggtgtgtgctccgcgcgtcttaggctaatctatcgacctaggcagaagagactgatgtttgccatcgaatgttgttgtgaaatcatcagctcatgcgaaagatcgactgggtattgctgccctggctcagtgttctttatctggcaagtcctcggacaagtgcgacatactgcaaaaaccgtgtactgaactttcctgtactcttagctttctttccttgatcgaacagctatcgggaatgccaagacatttcatatggccacagacctcaagttgacagatcagcaatatttactttgcttgaccatctttttcagtcagttgacttatttgttattgttggcgctgactggtagcaaatgcatgaagttctcagttgatcgtcagactgagatacatttattgcggttcacgcctcacctcccgcagttccctatgctctgtttgagcctccatcaaacgtcttgttgaagaagctcagtccgagggtctggctgacaagcatcatggtcctatggtcagtgcccgcgctcagatgttgtgtcctctaattacgtgtgatctccttgtcctgacggttctgctcgaccttatctataggggaatcgccatgatcgctcaaggactggtgaagaactttcaacagttgatggttgttcgaacattgctcggaatattcgaagccggttcgtcatcttgttttccatatatttttgagaaattgggaaactgaagctatgagaactgtcgtcgtgctgcgaaaataggtctttttcctggtgttaattattacctgtcgtgctggtgagcatcatgtcagtttgaaccgccgtctgttactgaacatacgttcatcacatatccgtcttctgcaaaccaccctaggtacaagcgaaacgagtttggtcttcgagcttcgatctttttctccgctgccactgtcagtggagcgatgggaggtcagttgacttgttgagagcaatatcctcaatcggaaaagacatccaactgacatgctgcgattttctcgaccctcatcaaacaggtcttctggcggctgctatttcaaacatgaatggagttggcggaaagccagcttgggcatggagtcagtcggtcttccatatcgccaaactccacgtccgttgctgactctgggtcgacttttgattgcgcgaacttacacagtcttcattctggagggaatcctcaccgtggtagccgctctgatcagtccgtttctgattcaaaatttccctgtgagtattgaatggagaatttctactgcattcagattgaatggaaatgctcatatctgagagtattaatgccggatgaccataggataccgctacatttttgaatcctgcagaacgtgagtcgctgacaagaatcatcaagtcgtcttcatctggttgctaattccttgtctggtctcgcaattcaggcgcttttgtgatccgacgacttcaaaccggagatattgtatctgccggaggcgaaaagttccactggagttctatcatcgcttccttaaaggactggaagacatacgttggaatgatcatatatgccggagtggatggcccactttatgcgttctctctattcaccccaagtatcatcaaggagcttggctacacagccgtgaaggccaacctgatttcgtgcgtgtttatatagttctgaactcatgagaacgacaaaaccgtctcaacaaagcatgatccgacatttctgacactggaacaccttcaatgtttacaattaacagtgttccggtttacgtgtttgcttgtatactgacggttgctgtcggatttgtaagtcatcatccgcgtttcagttgcttcaaagttaatatactgaaggacccttcgtggtttcagtcggcggatcgaactaaaaagagaggagtctacaacctgatatgcttaagtgcaggcatggctggatatagtacgtagtgatccagttcttataatgaggtttatcaaagttgacacgtgtatgttctttcaaagttatcctgattgtcagcagaaagccggcgttgagctatttcgcaatctacctggtgtgtactttttgaatcttttcgatcagttttatgattttaactctttgaagaactcaatctaacgtgttggcctgttgccatgccattgacctacaggctgccgctggaatctatcccttgattcgtatgccgtcttttgttttcgttctgttatctcaacatatcgttcagctcatgtttgattcgacagaatcctaatatttggctcccttttctatttaaaccagccaataccatcgcatgggtcagtaacaacaccgagggtagttacaagcgttctttgaccatgggcttggtcattggatttggtaatctcaatgtacgctcagctcttcctttatccgagaagcgcaatcaaatagatctagcgtgattgattcgcttcacatctggtatacgtagggagccgtaacatccaatatttaccgcgccaaagatctgccatggtataagatgggacacggcatcgtgctgtgctacatcggtctcggcttcacatgtaagaccttgtatatctgatgttagccgcgttgtcaagagggtttcttagcctgagctcatatggctgccacttattactttatcttctaacagtctcagcactttacatgttcctcctttcgagggaaaacaagaaacgagatcgaggagaggttcgtttcggcttctcatctctatttccgtacatactctcgtgctgatcttctctataccgggtctatatatagcgagacgaacacattcaaggccaaactgttcctacggactcgattggatcatcctcagctgttaaaggaaaaggcaagatctatgaatcagaagaccaagctcgggcggagctgggagatgcttattctggatatcggtacatcatttgattctcttctttcctttgggccggtgcaattctcgcacatgtattctgttctctttttgtaaagatattatccttttcatatcctgtaaatttcgttatatatgcttctcttccaagggtttcttccgaactcatcgcaaacgttggttgttgtggtgtttgttcaacactcagttcgctatgcttgtcgacctgaaacatgagccgtgtgattggccttcggagaaagccgggacaatgatgagccgattatgccgctcgagaagctaaacataactgatacatctccagaggttgacgaagcccctctctactcttttacctgttcaccacctcaacgtcaacacaaccatcgccgtagaattgtgctctcgatatgattgcttcgaagtttgtcaaaaccagcttcaccaggcttgcagcttcaacccgccagtctttttctaaaccgacgagtcggcgaggacttgttgctctaactactttaacggctgtagccattccatctgtaaatatatccacttccttccttgatagtcaatgcttttactcttggagaaaagcatctgagttaatggttctcttcttttaaaagggctttgtgtactttcgtccatcgatttcgcttgactctcaagcccatcctgtgaaaatgactccagaaacgacacaccccgagacccgggtgctctctcgatccgaagtctctgatcataaatccccttctgatggtggtctctgggtgatcatcgataatgcagtatacgacgtatccaacttcctggatcaacatcctggtggatcgggaatcatcgaaagcaatgcgggtaaggatgtgacaaaattgttcaagccgattcacccgcccaacacgatcgggactcacctgggacaaggagtagaaaaagtaggggattgcgagccgatgggggaggaggaggcgaaaagtttgatgactgatgaagaaaaaagaatcagtgaggctagaagcaagctgggtcacgtcgatacagtcgtcaatctggatgacttcgaggtgcgttcttctattatgtttgaggtgataatcagtttcccacgctaacgaattcagtttgaaacgaatggggtttttttagagagtgtgtaaagacattctatcgaagaaagcgcttgcttgcaagtctcttacattatttgtgatagtcatcttccttgttcaatttttgcacaatctgatcagaatattttcatgcgctcaaatcacaacagactactcttcgggttccgacgacgaagggactattcgctcgaacgtttcgtccttctcacgaatcctcttcaagcccagagtccttcgtaaagtaaaagacgtatcgatagagactacgattttaggccatccgtcgagctccccaatctacatctcgcccgccgcgcttgctaggctgggaaatgaggatggagagatgaaccttaccaaaggagcgtgagttaagctcgattcttcgtcacatactgataggccttccaagatagatatatcgggctcggaatctttgtttacctaaaaataggttagatgctgattattctcttatcatgacttcacgggtaaatctacagtgctcaaacaggaatcattcaggtcatctcttccaatgcatcttgctctttggatgagatgtgtgatgttcgaaaggagaatcaacccttgttctggtatgtgaagaattcgatatagaactatcttctcgtttttctaattcgtgcccacgactttctgactccaaattctatctgctccaaccgtcgttactgatccatcactaacgaacccgctacaggcagtactatgtgaacgccaatcgagatcttgcctacaaggctcttcaaaacgcactggaccacaaaatgaattcgatctgggtgacggttgatgcgcctgtagggggtaaacgagaagctgatcttcgggttcaattagaggagaatccggtgagtgtgcttttctattctatacatttcaagctttgagtataattcacgagatcttgctcaacgtttaaatgtgttgccgtgtatcgatctccaatttgggtatgaattctcaacagccaacgaatgagtcttctggcaaaggtggctccacatccgagcagatgttcagctttgtagatccaaatttgtcctgggaagatctaaagtggatgaaagaacgggcgcccgatgtgagcttcgtgattaagggcatcggttcggtcgaggttcgttttgtgctatcagttttcttctacatcacaactcgacaactgatctcgagtgagcccataggacgcagttatggctattgaagctgggatgaacgggatcgtgataagcaaccacggaggtcgacaactcaacgggtaaagcaccttttttcgatccaatgttcctttgcagtctccttctgacatatctatcgaacggttctctactaaaacagtgggattcctccgatccgaattcttgagcgattgactactcaacacgccgacttacttgccaaacacaagaccgagatcttcctagacggtgggatccgacgaggtacagacgtccttaaagcactgtgtctaggggcgacagcggttggtctgggtagaactttcctatatgcgcagagcgcgtggggtacagaaggtgtcgttaaagcggttgaggtgatgaatgatgagatcaagttaggaatgaggcttttaggaggtgagtttctgttggatcaatcaagttctttccttcattccaaaggcagaggccacaagatgttgaatctagattgtgttgtttctaatatcttcttagtcacctccttgaccgaacttggaccagaatatatcgaagttctccctatgtaaagagttgttgaagggtagaggataagtcactatttatatgtatatgtatgtgtatatatattatgtgcattccgttgaagctctataatgcgtcatatcgagaggctacacattaaaacaaactcggtgtagatgtaaggagagatgccgcaaagaaactccgaaccaacttgtattctgatactatgccacatcgaaggagaaggtgaacaagacatcccggccagccttatttatcttaggctcggacacccctcttgatctgctcaaccaaccctttagcctcatcctcatttatgacaacatcatgcaccttcttcaaatgtcgtcttaggtcatatgcccttgaaaatctgaactcgcacccttcttggttcgatgttccatcctctcttggaggtggggcgtaccaacaagcaatctttcgttcgacatatgccttcccggtcaatagatctctaactgagcctgccccttgcggcgttacttcgttggtagcgttatcggaaccgacaggggcaggattggcaggattgggtatagacaaggctgtgacaagatgagaaggtagaggaaagacgccagagtcgaaagcggcttgtaatctgatgtcggcagaggcaagagcggattcatcgagtttcgtgtcaggatgtttcttggccaggtgtcttttgagtagatgtttatgaccgtaagatgcatcgcatgtgccttcggatacatgaggacagataaatggacggcgtccgagatgagcagtttggtggtgcgtcctgagagccttgggctgaattgacgtgtgatgtatgaaaacaaaggtttgttgagatcaagaggaaccaatacatgaaaggaacaataaaagggcgggagaacatacagttttaaaagatttaccacagtctggttctaagcaatgatcattctttcctacaatactaaccgtccttctcctctttctttttgtctgttcagcacctgctttccaagccagccattggtcctccataacctgggtttccctctcctgcgcttcccccagcacctctcgctgcacttcttcttcctcccgctccaaaccatcttctgattcttcttcatcctgagactcttcctcttcttgcacgctatcaataaagagagaaaccttctctgtatcaccctgcccattctctctctttctcttcaagtctcgcttcttgtactccactcctgtttctatacgtggaggttcgaccatctcatcgccgctttcgggcccaaggagccgctcatcttcctctcgctcatgatgcactttcaagtgagctttcagattcctccgggaattgaatggttttcgattcacacaagtcggataaggacatgttggagggtggaactctgcgatatgagtccgaagaagggtccatgtcgcaaaggttggtggaggagatatatgggatgcgtggcagcaggtataccgagtgtctttcaagcggatgaaagtggtcagaaagaatggtcaacgtccatgagcaatggtccgtcaagatacgagaaggttacgtgaactgaactgaagtcagcacgaagagtggactcactatcatggactttcgaatgaatcttcaatttctgcctcgttgggaaaatctttccgcaccccttctcctcgcactgaatgatccttgcagccgcctttgcctctttaatccctatactttcacagctttcttggtgtcttttcaagtgctggcccgtccaaaaccttttgtcacacccttcattggagcaggcgaatggcttggctgattccggaaggtgcatgcggatatgagcttgaagatttgtagaccgtgtgaacgagaggttgcacgggggatagtctgtgcatttgaaagggcgctgttcaatgtcggagacgaaagacagacacaatggtcaaaacacaatgtcaattatgcccagaagacgcaatgccgaagtgatccaaatgagtacaaacctcgccggtgtgcgtgcgaacatgctcttctaacctaacaggtctggtaaacgcttgattgcatcccttgacagtgcatgtgaactttttgagccgtgtaggtttcttctttggcgaatctgaagaattggcagttgagtctgtaggcagccgcgctgctcttggtgatgctgtggatgatgatgttgttgtcggtgaagatgggtttgcggattggtcggaagcaatgggacaaaccaaagaacccgacacctcgaagacttgcccgataataggttcaactctctgctttcctttttcgtaataagtgaatctaggtacgtcctcttcatcctcgtcatcctcgtcatcctcgtcatcctcgtcatcctcgtcatcctcactgtcctcataaccatcagtgctgacctcttcgttgtcaagttggtcgtgctcctccttgattacaagctcttcgtccccctctgtttcgcccaagctcatatcctcggtactgaactccggaatggatgatttccttgctgcaagcggtgtggatgacgcgtcctgatcgagagttgcacccagatttgatgctgacttcctcgacggtcgaaacaccttggctggcttttgaaaaacggacatgaaagtcctatcgtctatgtttatctatttagtcgtcagtgtatggtgagagaacagagtgtccgaagagatgttcaaaaacaattatataaggaaacattacgcacagcttttcgccacactgctttcgaagcctgacctgttacttttttggatatctccctttggccgacatcggtcagaccatacatgcctatccgtcgtcttcttacactcagtcgttgccatattttcaatagatacagcttgttattccactctacgcatcgctacctgcacatgtcgaaccctactactgccgagtccaaggcagaatttaccaaatcgcctgaggagctcaagttgaagagcacgtcttccgttcagaaccagcttttatcctcggcggttgcttctacgtccacgactaccaagaatggactcagcaaagacgaagagacatcaggagacccagataagagaccggaaggatggggaacgagagtgctgcaagacgaagaccaggtcttcaccatgaacgcttggtttgtccattggttttcgtccatcaacttatgatagcaaccggatcgttatacggctggcttgcaacagtctatcggtaacttatgcgcaatctgatttggttgtttcttgggatacggtgattggaacgaattgtatgattcggaaccgggtcttgaagggatcatgctcccccacctgaagatctggacgagcgcgccgaggccgtcaagcaagttcaaagagaacaccaggtctctgacctaatgaaaggttcgttgatcacattttgaagtaaagtcgctgaaccattcatgagactaattctcgattgagagaaatcggacctgcgcttgcttaagatgtatacaacaagaaccctgctagtttctgggacagatttt

SEQ ID NO: 3150 - DNA, 20725 bp, Xanthophyllomyces dendrorhous
tagtctcctctttcatctctctttctcaagagatgaaggagaagcaaagaagagcaaaactcaaaagacaggtaagacgaacgggaggaatgattttggccgaccgagcaaaccaaagagccgggctatcactggtacttggaccattagttcaatgcacttttgagagcaaaacccggttcgatagcttgaaatttagagcaacaaggtcaggagaacagaacaagagattttgtaggttcccgcttgttgttcttttgagagatgttggctgctcgcttgcctaccggagagaaaaggaactgagaacaagatggttgaagtcgcacaggtcgtatttcgcttaacaccgtaatcggatttgaaagtaagccgccaaaacaccaacttcattctcaccagcttcatcatcatcatcatcatcatctgacgactcgtacatcgctagttcaatggaatctgaaatcaacaaagaatcctgctttctcggcacgttcatccacactccaactctcggctcgctcgagatactagaagatcatcttctcctggccgactctcaaggctatatttccttcttcggtcctcagtcgtccaaagccgctatcgacattctcaaccgtcattttccagccggaaacaaacatgtgcttcctccgagttctttcttccttccttcattctctgatctgcatatacatgcccctcagtacctctacgcgggcacagggcttgatcttcctctcatggaatggctcgaacggtatgcgttcagagccgaacagcgcattgatggagacaaggaattggccgagagagtgtacgaacgattaggaaggcggatgattgaggtcggaacaggagcagcgctggtatttggaacaatcaacaccgaatccaagtatgaaaccccaaccaattcttttgttctttcttagtagaaagtcttgaatactcaaactccttggcctttttctcttactctgattatgtctagcttaattttggcaaggacgttcctcaagcttgggataagaggctatattggaaagcttagcatggatcaaaatagtccagcaacgtacacagagaccacagcatccaacgccctctctgctgcgtctaccttcattgattctatccgatcactaaatgagcccaacaatgccttatcagttcatccagtgatcacacctcgatttgtcccaacttgctcggatgaattactacaagggcttggtaagcttagagaggaaaaaggtgtgagggtcatgagtcatatgtgtgaggccagagatcaagtcgattgggtcaaagcaactcgggacgatgtagaagacgttgagattttcaagcacgtacgttcttcgtcattcatccggttcttcataaaatacataaaaagtcttccattatcccatttttttcttcttgcacttctgtagcagaatactgatttttaagctttgctttttgcttctaaatagactgggttgttggaatcatccgtacaagcgcactgcacctttctgacaccagagaacatcgagcttatttcccacacaaacacagcggtcgctcactgcccgctatcgaacgcgtacttctcttccaaaacatttcctctccgagagttggttcttgtgtttttttgtctctctatccgcgattcttctgagctaacaaacgttctcattctcgttgataacagatgcctcgataaaaatatccatgttggtctgggttcggacatcgccggtggttatcagcttgatctacaaacccagatgcgtcaagccgttgtcgcttcccgtcttcgagactctcaactcaaagagaatgcacttggtcatccccgtggacaagaaaatgaaccgaaattaaaggatctgagatcaagctggaaggaaagtctctatatggccactaggggtggagcgttggcgctcgcggacccaaacgtcggaggcaggttcaaggtcggagaggcttttgacgctcagtcaagtacgacccatccaaatatctatctcacacccatggtgtcaacatactgatccgcgtgtgacgtccatcagttgagcttctggatccacagacaaacgaagggacaggcgccctagacttcttcgatgtggacgctgtcaagggcagcgtcagcctaggttgggaggagatgatcgagagatggtggtgtgtaggagatggtgcgctccctttctcttgtctcatcctgtacttttctctgaatttgaccacaaacgcaagctgatatccgttgttataaactatgtcaacatcaccagtcaggaacagaaaaggactttgggtacaaggtagacagcttttgtagatattcaatcgttcgatttgtttcatgtagtcacagttagacatcgtctttcgttgtataggaaaatatttttcaaagaaaggcatctaattaaacaacagacccgacaaggatatatctaatttcgatgattcacaattgggcagatcgagatttcatctactgctctcttgatcaactctaatcaaagcgagacatgtttcctcctccccctccttctctatttcctcctccccggccacctccaggaccgcctcgacttccacctcgaccgcctcgctgtcctccactgttggaccctcctccacctctgttgtggctaggtgctccgccgttgtacttgcttgaaccagaatttgagtctccatggggcttagagtcctgtctgtttctttgtccctctatataattgtgaaagcaattttaacgttcgcacattgtgaaagaagataggaacagtcaataaatgtgttcgaaatatacgatctcggacgacgtgagatttctcttactagggggttctttgaacaggttgagtctctccatacccttcaaacccatctgaaaaaggaaagggttgaacgagacgtcaggcaaatatgctttcaaatgtcgtgcgtgaacaaaagtgatttgatacggactttgctggccatcatggtcgagattggtggggaagtgaaaggaccgggaggtccaatgtacctctaacaaatagacaagcaggaaaacaggagagatattagctaacaagctatataaatctgagaaatgcaaaacaaaaaaaaggtacgtaccaaggtattggcagcgtagttgttggcctgatcaattaaatcctgtttcgaccatttgaagttcttcaaagacgagtttctgtaacccatccaagcttttacgcggaagcaatatggatcagcgaaatacttcatgacaagtgctatatcaaatagagcgagaactgatgatagtaccttgatacgtcttggccttgatttcgctagaaatctcgttatcgagcacatggtcaactttcgtcttgaagcttcccagagtcttggcaaacgagttgttagcctggccttccatgggttgaattccgagctgaacaacgtcgcctttcctcaagaaaaacgcttcctcctcggccaacaagagcgttccacgaccctccgcacctgtagaaaagaacaagaccgtagaaagcttaacctctagatacaaggacaaacgattgacaagaccggaatcgtaccagctcgagcggttcgacctaatcgatggacgtattgttcagtagacataggcagtccagcttggatgacatgggtgacctgtatgtgatatttgtgataatcagtatcgaatgcacgtgtgagagaaagcatcaaccgaaactgactccagtgaaatcgattcctcgagccgttacatccgatgtgaacaagacaccgcaagcagcgttcctaaactcctcggtgactttagttcggtgaccctgactctttcgactgtgttaaagcacaagatgattatactctttagcgattggtagtacaaatcatgagcaagacggggacgaacgagtgaatctcaaaagtggatccgatatcaagtttgctgaaaacttcgaaagccatggcggtctcgttcgcagtgggaaggaaaaccatgatcttgtaagaccctcggttaccagagatctcgttggtgattatcttgagcgtggccgcatacaaattgtccctatgaacgatcgcgaaccgttgatcgacgtgagcatgcgtatcctctgcgcaaaggatgaaaacaatagaaatataaccagtgttagcaaagaaaattacagacttgtgaacgaaacagagtgtgattgagatgtatagcaagagtaagatatagacatacgatcttcttctttgagggtagagatgaattgatgattgggcaacaaagcgatcttgacgacctgttatgtttcataagcaaggatgggtagaaacagaattgagaacacaaagatatgagagcgcaacgcagaaagtttgaaacgacgaacgtcatgaacttctttgggaatagtggcactgaacaaaagagtctgtctaggatgactcgatcggttaggcaaggctgtatattacaataagaagcaaaaagatcatcaatttatcagtgtatagttgttagttcatgcacaagaacaaacgtacctgcaaggatttccaagatgcttgacctgaaaccctgagaattttcaacacgatcaacagggagagagacgagtttagccctgaagtcgacaaattgatggaaaccattgcaagcgcacctgttccagtagctgatcagcttcatcgaagacaagccatcgaacaccttcaagcgttgacttgataccgtaatttgaaatcaagtcacagagtcgaccaggggtggcgatcacgatatcgtttggctccttcctcttaaagcaagtgttcacttttgttccgccaatatgtgtttggacgccgagctttccaggcaagtggctaacgatagcgcgcgcagcagtagcgatttgttgtgctatgagagaagcgagatacaacatgagaaagggtcgatcagcgacatcaagctgatctcaagttgaagagagagaacgcgtaccgagctctcgggtaggtgaaatgaccaagatggaagtctgacttccaacaggcggcaccggaagcgaaagaagtgactgtatggaaggcacaaggaatgcgagagtctttccggtaccggtctttgcctgagcgagtctgaagaaagaggaggcacgatagggcattgacataagtctaacgaaagtgacaataacaacaaaatgcaagtaagaggtacgaacacatcacggccttccaagatagagggcattgtctatcgaatttattgttcggcataagaaaggagagtcatcaagacatgagtgttttctccactttgggacatgcttcaaaggatgttgaagataaatcatgatgtgaggaacgcacgacagcctgaacttcagtacaacgttcgaatgagattccggccaacaagtcagacctgattttaaaatcggaaaatctcttgtcggaaagatgcttcgttgcagtagaaggtctgacgggctcctcgtcgacgtccatagcggtttcaacaacctttgtcggttgggaggcggagggctgttgtttttgcctgggcgcgaaggacgatcctcctcttcctctgccaccaccaccgccaccaccacggcctcgtctaggagtagaagactgatcttgaggcatattgtcaaagctagggagagttagaaaaagaggaatggaaagtgatgtgtgggagtctggattggatttcttttgatcagctttggtcaacaaaacaaatctcaaaagtttcagattcttatcaaggcggtgatttatctaagtcacgtgatagatatcgctcatatcagggattttgcgaggcagattaactcatgtcaatttcaagcctatcgcacttggagccgtcatatttgttcttgaatttagctggtttcatcttttcaatcccttattgatacgaaagcataagctgaactgttttctagtcgtgccaatcaaagagaagtattatcattcatttcttctcaaatactgtccagagccaataaatgacgatcagtagagttgtcagggaaaggatggcccggaaactgtcaagaaaaaagaacgacgtattgagcaagataaatgaaaactgaatgtgagcaagtgcatatgcctgaaaaattcggactgaatggtatgaaaaataactaacatgatggcacagataagtgctttccgaacagatgagtagaacgctgataaagccgctcctgaccagtttgttctagataaaatcgagacattggacagatatcaggtgagccatttgcaccgatcgtagagaatctaagcgtatatggacgaaacaacaaacctcttattggtttgtccggctggtcgatctaagctatcctcccatgctcggacaatcgttctgtacctcctaccgaacacccagacaaagaaaccaacgtctaagaaagaaaatcggggtaggaccgcgctgttcacacccagaataaatttcaaatctttaagtactacaaatcctgagcattctgaaatggtgagtatacctacctcaatccaggattgagtcctctgactctgctattcagctgcttctcatttctcttattcacaggatagctttctggccggatatcttggcgttcgattccgctctttggatcttcgaacgaggaaatgacagtaaacggtaatggtaaagttttgagagtgggtgaaaatgctggcgaatcgggcggggtaagagaacttgacggaattaagaatgataagaattctctatttcattcattcattcgacatttacgtattttagcagatgtatggtcgcaagaaatgtcaaaaaccgaaatgtacgaacagcgtcattcctagggttaatccccaaagcctaagcccggtttctctttcacccctagctttcttcttcccgactccgaaccagtgctcgaacgttccgacagtctgagtccagtcttctccacccgcctccacttcgggagaaacatcatcgcgaacccaaccttctgctgtagccgaaggtttgtcgggaagcgcgatagcaccgtatctggtaagtgggtaaagaagacgctatgtcagacatcataccaaaataactttatgtaaaaaggttgagagaaaacgtactgcatggacccaacaaagagatggatgaatcttctgacgagcatatttcgaggtgacaatctaggtgagagggagatgctgatgacggcccattgtgaagggggtagtactgcacaaatatgattataaagaaatgcagacattagtctttagccaacgcacggctggatatcaaaggaacaaacatgtttcaagtggaatccagtgcagggtagaaacttcagacggatctaattctgggataggagacattttggttgtctgaagaaagactgcatcggaccatacatcgagaaagcattcagcttgatacacgaatatgtatcgttttgaaagcacatgactcaccgaacggggacaggatcatcaatagtcttttcccgagagaagttgtgatctccctgtcatctgaggtaaagcagaaaggtctcaatcaaattttgcccacaaatgacattcttgctgtggcacggaacgagccataaactcaccaagttgcccaacatgtagccagtccggcgtggctgctagatcaattccgacttcttcccaggtctctcgaagagctgtatactttgcgctttcgtcttcgggattctataaaacagaaaacgttgaatcaaaacgcgatcgaccgatcagccaaaatcggtgaacatacttttctgcctcctgggaacgccagttgagaagaccatctttgattgaaacagagaggctcgcattaatatttcttgaccatttgtcaacccaagtctcgacctaggatattgcatacctatctcctttgctttttgctcggcgaataaagagtagctcagccttgactcccttctcgttcacccaaggtctcttgaagaagtcatccagagaggtagctggagcatcatcatcatcatcgccctgaccattatagattgatgttgggggaggcactagtctgatacaaattgccacggatgcccttccttgttgcgatggaggtgaagagatttgtctaggagctagtcacatcaattccattccggttcggcccgacccggttgaaagagtgtgaggttaaaacttcgatgaggacagaaagagaacactgagaagggacacacgagttgattgaagagacaataaaccacgtcgaagatttgagatgacctcgccgtcttcgaaatcaatgccgcttgatgagagttgctttccaagtttgacggatgttggtagggttgtagcagctttgtcaatcagaaacgatcgaattttgacattgaaagcgaaaacgtgaaaaagaatgagtttgcgattcgagatattcgtgtagacgataatccatttcttaaaatttcatactaaccagagttcttcttccggagagtgtcttgagaggaatccatgttgtcgagtgtgctgaagcttgagcaggacaaaggtgaagttgaaaaagaacgagatgaactcttcgccaggaacgcaactgaccgaccaaccagggaacccgccgttgggggcccccaacagatttcccgtccacgcgtctggaaagttgtgcctgacacgcgtcgacgcgtcggtttttcattttaatacactctacgctttctctcacttacacacaaacaactgtttgctccaagatgaactcttcgtccaatccttacctcgagaaacaaaccattctgttgtccagattggtaaagacattggacagatgcaacgaagctgttgttgatctcaacggccatatccaagtatgatgttttccaactttgcctactgaacgtagtctggtcgtatctcatacgttatttttaacatacaggatgttgtgtcaaatcccgattccgaaacggtcattatcaccgcgaagctgttcgaaaagtatgagcggaacgtcgcctacaatcttcctcatttaatatctgacgaaagtcgagcaggatccggagaaggcactggatcaagactggcaggggagccgtaaatagagtgatttgagcatatattgagcatgggaatggggagagagcttcagctaagtcatgggattgtcattcgaggatcctatgacacggccatctttcaactctcgtcatcatacttcacttgtgcaggcgtaagtgttatcttctgatgtcatctaccttcacatcgatcatccgtttttttctttctttcgataattcatctaattctcatggttgaaattgagaaaagtgcagatgacttgttatctgccctggctaggcttctggccatctccatgtgaggagattggtgatacagttatagatacaatttcgaacgtaggtcctgaaaccatcctctatatgtatctgtcaaatgctcatactctatgcatttgtgtgtgaacttccagtcgctctcaaattactgcggtggccaaccacgctgccgaattgatagttgacgtcgtatatcatttgtttcaagatacccgttgcgactgctggaacgtcctctttaccatgccagatagcagctcgaagcttcttttgagattacaactcattgtgacgttcataagattagtatggtgaataacgaaagatagttataccagtaggaggctctcagaggaaagacaaatgagattgacatggttaaaacctatatgttgtcgcacttttcgtccggtctgttgtgcttgacttcgtgaaatcgcatgtgtcgcaacaatagttccttgatgaaccaatgaagctagaatcttggtattcattgtacttcatcttactcgaatgcattcgggtaacaaacatggtcggtcttgtgagtcgataagccatatactattataacctttcgactttatgttcttatagctgttcatacgaaggctctcatggaagtcaaacttatgcagaaatgtatcctgaagaatctgagcatcaatcctaatcgcggtcgattttaagcatattatatcgaaactccgagtcaggctggacggaaaaaggttttctatgcgaaagaaaggaacaatttcttgtacaacatacagcgtcaatcaccaaacaattttgatctgtgcatgagcgaagtttctcgcataaaaataaatcaaactcgaagagagcagacgaacatccattgtcgaacggaaatgaaataaaagaggaagaagataccgagataaggcgagagtctgggattacccggatgttcggaccgatcaccgaccgcatgttttttctgccgttcatgtcgtcagtatataagcgacttttcttcatatcctccctttattcatcttcctcttctcttcatattcacaaatcctttcctgagcttttatatctactttacaaacaaaattaaaccttaaagcatgactactttcactgctactgtccttgtgagcttcaatatcgatctgcttatcaagagaagaatggaagtgatgggttcttctgcgttcaaaagcttatccggttctttcctttgtactatagcacggcgctcgagaccttaaactggtttgtcctatttagaagctcatatttagttgtatattctaaatgccgatcgacattggtgcactttaataccacaggaaaccagaactctcgaagcaccgacagatggcaaggcgttcgtactagattctgcgatatctatcccttccgtatgatctcaacgctaacttagttcacttggacatgttctagtcaaatccgaatcatcgcgactggtttgtgcggatctgatggtgagctttgttgaaattagtttgtctgaatggtgttctactaaagcgcagactactaacctatgattcccctcttacagttcactactacacacataacgccaacggagccttcaaagtacaaaagccacttgtattgggtcacgaagccggaggagtgatcacttccttaccagaatcatacaagggtgacttgaaggttggcgataaggtggccatcgaggccggagtctcctgctcccgatgtggagattgcaagggcggaagatacaacctctgtaacgtaaggacattctctttcattcaaaataccgacgttcatcagataattctaatcaaaaccgcgtttggttgtatgcggtatgtgtctgagcaggaaatgtccttctgttcgtcggcaaaaaccttccctcaccgagacggaaccctccaggagtacatgatccacgatatcgattacttatacaagtcagttctcttatcttatctaccctcattggtttgaacataccactgacaaattcattaatcctacaggatgcccgctgatctttccttcgagcttgcctcgatagctgagcctttgagcgtgatcctccaggcgactcgccgatcagcatcccctcagcctggttcttccattctcatcttgggttgcggagctgtcggtcttttggcagccgccgttgcgcgatcaatgggagccacaagaatagcggcagtcgacatcgacgagaaaaagctggaattcgccaaagagcaagggtgggtggacgaaattcttgttttgcccagggggccgagattgagcggaaaggagagtttggaggctgcaaagacattggcgggcaccatgcaagagacttttggaagcgctgggttcgatgccgtgtttgaatgctctggggttgaggtttgtcttgttcaaatttcatgccttgcgtagtgttgctcatgagaagactaaaatcgcgtttgtattgtatctcacgaaaacagtcgtgtatgcaggtggctatctttgtgagtatatcttatctccaaaaaaagattcgtttcagtactccagcgagaaagacgctcagacttgttcgtctgtttctgtgtatcagttggcccgaactggtggcaaagtagtcttcattggaatgggaaccccggaagccaccctgcccactagcaatgccttcactcgagaggtcgaccttatcggtttgtccatcatccgtttcttgattttcactgaaccctatatcctcgatatgtgggatgaacaacctgttgagattttaaccctctttcatacatcttattcatacaggtgtattccgatactcgaacacttatccgactgcgctctctctccttgcttccggtcgacttggaccaggaatcgagaagatggtcacccagcgatacccgctcgaaaaggcagcgcttgctttcgaggcggttgcaaagggacgagatgagaacggaaacggagtgatcaaaacgatggttcgtccccttctatcgtatctcggttctttgtaaaagacaactcaactaacttgacctgttcgtttctctttgatttcccatattggcaggttgggcctgactactagttttctcacagttttttgttctttccattcctatcttcattctggttatattctctggtttatctttacttgtatgtttgacacatgtaaaaaattaccctgattcttgatgcaatatttgggaaaatacatattggaaacatgagatcacgacagaaacagtcaaatatctcctcaacttcttctgttttattttgggcccagacattttggttggatttcgtgttatccctatcgtcgtgttataacaaaacaaaacaaaacaaaaaagccataaaagcgagcgaatcttgactcgaaggacctcttgttgagagctatccccgacctttgtctatttgcagggtcaactacttctaccagccaggggcagatccccaagggttgttatctgctcctccgtaagcgccttgtgtcggtccagtttgcgcactggtgtcccagttaggttcagctaactctgttgggggcacagaagaaaggagagggtttggaccggcggacgatgaggtggtagggaacatttcttcaaggttgatcacgatggatgctaatttgatgttaagcgcgtccaatccctgttcgaggttgcgtcaggtaatgtccatccgagatacacgtgtctgacaaatgatacgtggcttagatcgttttgaaataacgtaaaaagtacctactcgatcaaccacctcggccacgtccacactacctgaaccttctgcctcaaagtagaatcgttccggctccttcaagaaatcaaacggttcatcctccaacggagggttctcaaaaggtgcatttgccgttggcggccattcagacttggctgctcgtgtgaaacgttttgatttacagcatgaattttctgatcgggatgacgaacttgcatagagaaagatgaaaatacgaaccatcactctcgtaccaataggatgtgtgtctcagcgcgttatgaggatcgtattcaaacgaaacagcggatagaggggaccattttgagtgagtttttgcgataccctattgtcaatagccaattggaaccattaccaaagagttgttagcaattatttgatcaggaaacatacagattgcatgacagtgtaaactcgccttgaaagctttgcagaccaaatccaactcctgtcctttagccaatttgacaagatagataggtttgctatccgggacacctggttgtgacatgtaaattcagagaatgagatggttgatgaattcgacagtagtgctccgatcaaacatagaacctcatgtcaaagagatagcaacacgtacccttcccaactggttctccaaatccctcacctcgggcggccctttcttgttcactaagcggtgcttcactcgagtttgtgttgtccatataaggatttgcactcacacctatcgacgagagaagagggaaacaagttacttgtcagaagttcagctgtcatattcacattcgtagtcaaaaaacccaatcgtgcatcacacaatcgtataataaggcggcacacagaaacgaagaacaagcactgaccggtctcgacaatttctaatgcttcagaagttacagtgacctctcggtcggtagccttggctcttaaacgtaaggtgatacaacaatgggagcatccttcgatacagtcacaatcctgaggaaatttaaagagatacataatccatcagaatatgcatccacacttgtcaatccgtgcagagcaaaggcatcatgcgaagcaaataaacgacatccgttctgtaacaaatacaagggtcgagaagagaagacacgaaccatgtgccacttcaagccttcttcacatccaccgcttctcaacgggattaaaccaagccgatgagccaggaattcatcagccaagacagacgtgttggccgagatagaaacttggtcgatcgctgttggagaccaattatgatacacgtcgataatcaaggcaatgagacgctcttaagttgttgttgatctcgtctaaaggaaaaggaatggacggatgaactgaccaactgtcggcacgtcggccatcatcactcgtctcagtgagttggcgaacctgagagaagtgacatttgcattcacaaaacaccacggaatatatcgaccgaaatcagcaagatacccttgcaccaaataccgagtggatggagatacgaaagacaggaactcttcacgacatggaccatccatgatcgctaggaattccgagtcgcttctctccgacaccagtcaaaaggacgttaaagaggaggacgaacgacatatcgacaccttccaaagtaaaggacacgcgatccttttgaagatctcttaggacaaatagaggatttgagttgtcgactggcatcttgagaaagaaaaggatgtcaagccagaaagtaataagagaagagagtcggaggatgatggagaagaaacagcaaccaaagaaacgaatcggaaattcattcagttttcgttgaatttgcgaaattcaatacaaatacttaaatcaagctaggctgatattctcatgttctacgatgagagcacacatgcacatactaagacagtagcgaagccggatccgaactgatgaaaacctcaggcaacctgataggtgctgtttccttgaaggcagataccgaaagcactcttgatgcgggcctcaagacccacacagcatccggcttatacctacaataggtaatcattataggcattaagcgaaaagaggcaaaagtgaaccccaaaaacaatgatgaaggcaatcaaggtataaaacacacaaaagatttcaagaaataagctcgtgaatattgaaattataagaaaaatgaaaaaatggagatatgaagaaaatgtatatatagagctatagagaacaccgaggggtatgagttgagagcaaaaagacgacaatcttttatagaagaaccgatgggagtcagcagtagaagaaaagaagaagaagccttgcttgaatcgaagttgagggtttcaagcagtcagaaatcaatatcctttggaatcaacgaggataagcccgaccagaaaagatgtcagcctacttgggtttctccgtagcaagagaggttcgaaattaaatcttgaagtatcatctctactcctatatatattcgatcaatcacgtaaatcacgtataccgtttcgttggccgtgccagtagagtgaacgaacaaagccaaaacaccacattgatcagagcgagtcgagagcgaaattatgaaagatatacaggggactgactcagcaaagtagcactctcttggagagattctatgcgttctgtttatgtatgttttgacacgtttcttgattcggaggtggagcggactaaaaggttacaaacgaacccagaccaaaagaatacaattcgagtgtaagtcaagtatgcatgtcagttgattggctcacttcaattcctttggggttgtttcctccaaagccgatccagtaggtacaaggatcaaagcagaagggtaaaaaaatgagtagaaaacttgaacaattgaacatactggcgatcctctgttctgtatctctacctgagcattcctcatagcgaccacagcagcctcgaaggggtccatcatcgatggacgtagctggcctggattcgtcgcttccctcacggtgtcattttgtctctccggctgagaaggatcaggacaaaatcggacgaaacgaaagaaaagatgcaagaggatgtaagatataagaacgtagctcatgaattgatctggaggatgtattcaacctatttaaacaaagaccatgtgaacaaaatggttgatctcaagacgtacagacaaagcaagctcatgggtttcttgaggacatggcttataatccttgtcgttcccggaccataatgttccatcgactctcctcccttcacagggtattccaagtgttttcgatgctcgcaattcttcttttttctgtagttccgaagagtcgacagtgaccatggctgagaatggttgtctgttagatcggaagcaaaacggagattacacgttgaaagatgagataagaggtcggtgatatagggttcgacgagcgaccgcaaaggattagaagaagaacgatatggatgagagcgacagtgcgatttcgccttggataccagggaaggctgattcacaagagttcacaccctagagggcgaccaacaagttcaagcgttggacggttacagccggagtctttgcttatgatcctctcagccccgatcttgcttcccaaaagtcgattgaaccatcgtgccagacctaaacgagcaaccgaagtacccacctctgatgacaagaacacgttgacctttgtaatgtgtggagacgaccttccatagaagccaacgaaacgaaagaagaactgaagtacggataaaaggagcgccggatggaaggcgcaaatatggcccgatagatatatcaaaccatacttgcggaggatcgccagcacacgctgcgcagccgatctaccaaggcacaagttatcgagcccagatgtgtcgatcaccgtcaccctggcccctggttcctcgcctctcgtccctcgccccttcgccacctcgtttaatcctatagatcgcagaggaatgaatcttttcatgttcggggaaactgactatcaggacaaagatcatcgctctgtatgtgtgttctgatattacggataccgtttccgtctgatttaagaacagttagtccattcggctggacgccacatacaccggcgactgatcggacagatgagacaaacgccacccacacgacacaagcgatacagacacgtattggccatggtcacaatcctacgaattaggtcatcatcaaatcagccctgactcgttcgtttcttttgcctaacccaacctcttcggaatacaggcttctacgaacgaggaggaggataccgcacgatcaagagaggaagagagacagataaatgaaaataagaataaatgccacgtggaactctgaaaaaggcctcgcactgttcatcactcgtagatgccctcaggccgcatgtcacggcgtatgacagacaggatgagagggaaaaacagtgagagtggcgagagagtttgttcatgtggaaaaaaatagaaagggaaaaatagggctacagacgagatgcaggtcatatgcatggccgaatgtagcacacaatctccaaatccttatccgctgacgaacttcagtcgaatccctctacgagcggcagcagcgacctcagctgagcgaattcaagagagattaggttaatgtgcttgtacatttcggacgagatatacttcgacgatctacgttcagaaagaaaacatgcaacacgaacctctcttttcagagtcttcctgacgcttgtcatggttcagaacgagagccttcatctgttgctgctcgagcttgtcaagcatctgattggatctagtattgatggctaaagcagaatcggctggtatgtccatcaatcgcgtctagtaggagatcgtttttatcaaaggttgaatacgtcgttcttcagtatgggtcgaaagattgaaaaagttgaaaggcgataactcacctgaggcttatttcctttcttcgttagaagcatgaacttcatgtttccccctgaatcctctgatgcgggccggatcaagtcatcctctcccgccttggttcccttgtgagctcgcctcatcagtgggaccgcactatcgaatacagggattgtagcttttctgtcaccctttttatcggcctgctcgatgagcaatcgtgagaattccttggtgaattcatcctcttcctctcgagtcattccgtctgcttttgtgagcccacggactaccaggtcgtcctctatgtcttcctctgtagcacttccctcatcagacagatggggctacatcgaacaaactcgcacagggttacttcgactgcaaccgccgttcgtgagagcaacggaatccagaaactcacctcctcgagatcctccttctcttcggtttcttctctcaaatcaatgacttcctctcgatcttcatctccactttcgcttccggaatcaacccgttcctcttcatcatcggcgactgatcatgaccatatcaagcaagcggtgagtcaacatgccgggaatcaataagtggtcgcagaagagaaagacgcaccggttgactgaagagcttgagaagccaacaactcgtcaatagcaagtccgacctcctccatatttttgaatgggacaagatccggccggatcaactgtcataatccaagacgcgaactaatcagctcaatgttcatcaatagtcgacacaaaaggtagccgaatggctcacatcgaatgtatctgagaccatgaaatcaacgtccatcggcggatctcgtttacacatcacatatgcctgtatcgccaaaacagtgatcatcctgatgagtacagaaattcgcacatgagaactataagtgatcatctggtaaaatgacactcacctggaagacaatcagaaactgatcgagtcttttctgttggacccctttatcaaaacacatcccgcatgtttccaataatgtgcagattaatcggactcgaaagtaatcatcggcagcgtcgacaagggacgaccttccagggacaggtagtggctcagctgttcaaaacaagagaaagacgaagaaaggacccaaaaaaaaagggtttatatgagacgtctgttaaataattcaacagtctagtaagagaggacgacattggtagaaaagctcacaatgtccaaaagtgatcaaagaccaaagcgtatcgaagatgattgtggaattgacttggcggtagaaactgatatcgagacaaaggtgtacttagtgcagtcattaacgttgaacatatataaacaaaaagacagcagaagtacgcactgtagttctccgagatactttattgttgcaatcctacgttggttgtgcttgaagatattggtctccaagccagcccggatgttctccaaaacttgatctaccactccagttgtgaaatctgaatgaaatttcgccaaatcataaaccacgattgctaacgctccaatatttgagaacttgagtttccaaactttcgtgaacgctttatgtaaaatatgtacgatcttgtcgcgcagtagtggagtttgtgtgactgtgtcagttatatagaagcatctatcaagatcacggcaacataaaacgatgaagaaccaacctggggatcttcccaatgaagctttctaatgagcttcaaaactttttcaacggtcttcttcataagcacgtcatgaaccagatgccgaataaagaggtccataggagttcgctctttctgctggacggctggtcggtcaggtgggttgcactgatacatagaagagagatcatcaacgatgagttgatgagtaacaggaaggactgttggcgtatagaaaatacttggaaagaaagacaaacctggtaatacgcattctcgagtaaaagtgcgagtctcggatccatgtgttgagcactttgcttccttctcagaagctccaactgaacaaccaattcgccagcaataagaaatcaaatgtcaacttccatagaagatagggttcatgaagaggcttctacagaccatgatcttcatcctctctcctgtctcttcactcctcaacaagaaccttccacaattttctaacaacaaagcggcgcattcgatgttggctcctgccaggtcgtctactagcaccttgaagacatgaaggattgtgtgtggtcgagcgactttaaacttggccaactctgaataataacggatgttctgttggccgttaccatcaatggtcagccaatgaaagtaacccccgatacatcagtatgaagctcgtatgtgatatggttgatttaaaatatcactgtacctttgatcggacctcagccagctccttgacaagtctttttcgttggagataccgaaactcttcgtccaactgttagtttcgccagagccaggggcgaaaagaccacatcagaagggaagcttgaaaccaggaaaaagcaagtttaacgaagcatcttccaaggactaacaatggcaattaaatctttcccgacgtccggcatatagggatccaaagcagcaacgaaccgggcgtagagaggtaagaggtcggatcgatttttaggaaccgagctcaggaactgagacacagcggaaatt

SEQ ID NO: 3151 - DNA, 18111 bp, Xanthophyllomyces dendrorhous
gttagaggggaaagaatcagagaggttttctgtctgtgtcaaacgtgaagaacaaaagaactcagcacaaaccttgacgactttctttctgcttggtttcgagttcatgattgcaaaatccactgccaactgatcgaccactgatttcgaaactgcttccggcaaggccgtaaagatggcgttcaatctggcaagtggacctgcggggagggcaggatcatctgctgaaggagtgaggattgcggtggaggggtcaagatttgagagtgacctgtatatatcagttgaggtgagcgcagacacgcccagaaaatacgcatttagcgaaagttgatcaatatgaagggaaaactgataggaactcacgaaacgaccgactctggaatctcccccgtcgctgttgtctcttctccatcctcttcaggtctaatagcttcaacttcctcgatccccgctttttcgtcccctagctctctgtccagtattactatctgatcttggatctcttccgcttcttttccgtctttttctttttccttctctctctccttatctttcttcaacttgacacccaagaaacctcccggaacaaaatcagcaaggtcgataatgtcttcgtaaaatttacgctgctcctcgtcttcccacatcccaccaacaggaatgtcatccagtgaacgagcataagggttagccgaggtcgaactatcaaggacaaggacggatcctgagcctttcggaggaggtagcgcaggaaaggatggggctggcagatgtaatagatcggctaggctgttacggttagagagttgaaagacaaagaatgagtttttattgtaagacatgtgaagtataaaaggttgacaatctagacgtacgaggttaatccagccattaatctctctacctctttcgtcatcttctcgtacgcctgttgtctatcttcaaagatttctcccgacttgatatacgcctcgtgattcttcagatcctgttcttgcaatctctgtaaaagccaaatagcgcccgatcccatgaaacacgcaaagcctgctggtcagagaatgaaatggaagcatgataacgggaatcaaagaacgtactactcttcccttctgaacgtttttagctaacgattcatagtaggagttgaatgcagttctcagccgactttgaacggcgcttggaaccagctcatcgtcctcgcctgttccgacctcattagtattcttaacttcttcagttagcgattgagttcttgtttccgagccaagatagagtcttccgaaagttttcaggaaggacgcaaagagcggaagagaggtgaatattggatcggatgtcaactacaattggacatgaagcattcatgttcgtggtacaagaaaaggtcaaaggctgtttctttctccagtaccacacaatgaaggcaagtcttatgagtgaacaagacaaagagagggacgtacaagcgctttgagcgcctcttcaaccaaccctccgtcctttttctcctccgagcttcccgtcccagttccagctgtctttgacctttttcctgccgcaacgttcaacgctgcgacccctccttgtatcttcagaccgcatacctctgcctcggatagaactctcaacacgcctcgctgtctagacacccgttctttttcttctcgatccctttgctcggcaggaagagctttaagagctgagggagtcggtggggcgaggagagcgtacaattgagtgaggagaggaagaagaaagacggagtggtccaaccgaatcgacaggcgggtgaggatctgtcaagatgaccaagtaggagagaggcaatgattaattcaaccgatcaagagagtatgtttgttgcgattaacgaggatcaatacagtgctgaagatcgaagtttgaaagctaaacctcctccacactgtacgagcaactcttcgaaccgaaagagacatcgtctccctcgagataaaagaaagagagcaagtagtttgcgttcaagagaaagaagaaccttacctccacgacacttaacacgtctccttttcctcccagccctgtgattccttcaacgcaagcatccacgatctcttccgcgtactttcccagactcagactatcgatctcctttagcacactctcctttgattctaaggaaaactgtttgcgaagcttgttgaggagagaggtgtgtcgttttagagaagagtcataagtcttcttggaagcgacagacgggttggtgtttagttgaagaagaggtagtcgtttggatcgtttgagaggatctggatgaagaggtagttcggttgacatccttgttgttcctctgtaaatcggggccaggtaagaggtaagagcgttcagatgaggttttcacagacaaatgttgttcacagctcaacaaaagagagactgaagaggtgaaagtgggtatctccttctgatcgagtcggaagtagaagatgggagttgttgaaagcagggtcgttctaattatcacaaacgaaggaccacctccgccgaccgacatacttttctctgctttcaactctatccaactacttcccttctccgtctctcttgatcttcgcgttgccagtacgttgtctgcattcttaacatcttccttgttctaaagaacatcgagaagatcgaaacataccaaaggtagactaaggattctactgctgtaccgagtagacgcgtatcctgtgttcagatctacccactgatgtgaacctgaattgtcgaaggcacttcctggtctttgaacttgataggcgatatgcaagagcataacagaacattacatagatctacaactgtattcagacaactttgactaccctcgtacacctgatccttctctgatctgtcctatccagattctgagctaccctctttctcgtatccgtgtccctcgatcagcccaacactgacggctaagcctaatttgagggcctgagcgatttctttttgactcttgccttctttctccaagttcttcgcgtattgagcgtggatcgcttctgatctggcatgctgtgggtccatgacaaagggaagtcagctaacaggttcaagggaaaacaggagaggaaaaggaagtatgatgtccgcggatgttttagtgaagggattcgtgggcagaattttggtagtgtctgacgatcaatgccatggacgtttgtaatcctcaaagcttcagaggtgggatctagctgatctcgatgtccttgatctactagttacgactgggcataaggatagcaattcacatggatgacttttctcccactctgattacgctccatatgcacagaacccatcgaaactggcagatgttgtctggagatatcaagagacacgtacctccttcttgttgtgcaagcactcttgataatcctctctgaagagagtacaatccttggggttgtcggttccagcgtagcactgttgagaatcaaacgagaggtaggcgatcaacacggtgaatccgagtggaataaaccgatgggacagacccttgtaaagtcttgccagaatacgaagcaaggtgtcaaacctagaaggcaaaaagaagagaagaaaagaacgagtagaacagtgataaattggtccgatctcaaaacagaagacaaagtacaaagaacgcaagggtagactaacctcctttcaagctttgtccggactataagaaaaagttcaacatgatcctaagccacaaggaccaaaacaacaacggatgaacacgttgatggacataccgccattgtatttgtcaaagttgaagttgaagctgagttgttgagatggtctatggatgagatcggatgaaccaggaaggcggggaagattgactacgagatggagaaccccttaggtaacttagataacaagccatgatctgcgcacgcctcgagatacactcggccgagagatggtgaaagatggaacgtcgtcttcttctaaccttatacatcatcaacgaccttcttcgtatcttacaacatgtctctttggtcgaaagtacaaactggtcagtgtggtattttgtttctgaagaaaccatctctggttgccttggaagcatcgtttcagtattgctcattggatcacgatccggcttgttccttgaattcgctctacatctcggccactgtcctcaggagccaaaaaggcagctggacaaacaaccaatttcttgcaggtatctgctgtgttcacataatctaatatcggatcaacccaaatcacgcctttggaccgttatagacctgatctcacgatttctttcgctgctctaatctgccatcttgtctgaatcaataggaaagctccactcttgctgtatcgcaagcgagcggggttaagcaaaacttcagcttggccgctgaaactcagaaagcggctgaaatcctaactgtgtttcttggtcagtaaatctgttgcaaagacctctttgtcctattctgcgcctcgacttactcgatgtacttcctctgtcacagccgacccgaaccaacctcgatctgctctgaatgctatccccaaggcagtgctccttaatgccaaaggtcttgccatttttaccgttgtcaaagccgggttcatcttctctggccgaggaggaactggactggtcatctctaggctaccgtatgttctactgtctcagtcgtcttcatcggcttcaacttgacttgtctaatcaatgtgcgtcttcacttgtgtcataagagacggatcttggtcagctccttcgttgattggcacaggagggttaggttggggcctggtcagttcattgttttgtttaaacactgttgcataaagagcaacaagctcaacagcatatcacttcattctatcggactctatagcaagccggagcgtaagttgtcatatcttgtagatttaggtgtcatcagctagtatgtttctaacccgctgctccgtataccactgctggacgacccttttgtatagtgatatcaccggttcgtttgctgttctttaaagaactcaatgatcgtaaagagcttattcctgttgagattttcagatttcgtggtagttctcaactccgacgaggccgtgcgatctttctcgatgggaggaaacgtcacgattggaggtgagtactttctaactcgcgcgtcatccgtgctcttattgattgatcttccaattgttctcgtggtcatataggcaatatctcggctgccgctggcccaattggaacgggcggatccgttcagacggctttggcgagtccagcagccatgttcagctatagcaaatccaaaggattgttcgctggactctccttagaagtacgttcatacctgaaaaataactagcaagagccccttcgccgatgaacttttcgggcatttcaagcttacgcaaacaataaattaatggacagggcactgtgttgattgagcgaaaagaagcaaacaaacgtgagttttagtcttggtctccttgcttttatcgagataggtcatccctgagtgtcggctttctttttttgcctctggttagaattctacggttcggctgttccctccagggacattctttctggcaaagtgccagctccagagattgcctctcgtaagggtatcagtttcagaagatgaccgttgcctatgtgctaaaatggctgtttctctcaatcatacaggaatgtacgaggtcatcgaagctgctgaaggaatcgatgaatcgtctattcctcaggaggcgtatgttcctacggccatgggagggcacgtacctgtgaatgagtcttcgctcagggcgggcgcgcccggagctggttcaggaccaacgtctacaggattgggaaatgaaaaggggagcaagtcgaacgtggtgtttgactctggggagaccgggaagtaggccttgatgtttttgtgttttctttcgtactcttatttcttctcttttttattgttattcttgatcaccttgtttatgttttcccatcattggacttttctatcatcacatgatatctctcgtgcttctatctctttcgtaactttgtgctctcgatagttctgtcgacaatggtcagaagtgaatttttagtgggcgagtggaacctcttctgctctaattcaataaatctcatgtattactggccctatcccatctcgattcggattgattcctgatgtattacaaaaactggtagtttcaaagaagtcggatagtgtttttctttgtcaacgatcctaagtcttgctctattccccacagatgtgtcttagcgctgtatgcacaacagatgagcatcagtaatggtcgtgattgaataaggtgagaggaagaagagaaggaagaacccatttgaactcactcgaggaattctaagcgaagaccgtcctaaaatagaagggcagatggggaagaaagagcccttaagtcagtacatgtctcacggatatcaacaatggttatcttcccagaatctattagtatagtttggatccaacacacgcgaaagccccactatcccttcataagacggagaaaagaccaacaacagagaatgtgaaggtaaggaaagagaaagacctacaaagacttttttaaattctgctcggagttttgacaagtcagctttactcgaactgtcttgcttgacactttctatactccgctcgacatcttgtatcctttttacatgatctgccatctgagtgggttgaacagttggtcgagcgtaaagttttgaggagcgtcgagatggcagattaagggaaaggattgtcgacaccagcccaaccccatagataacaaagagaagacacaaaaacaaaactcagatgtcagcacctcgctcaaagggcaacaaagaaagaaaagcatgcagaaccaaaagacgaaccaaagcaaccgacacgttcaactctctaactgattcctgcaacaagctggtgacttgcttgtattcttcaaaaatcttccaagacgcgaagccggatgcaatagaggtggcaagtagaaatccaaatgcagctcctctgaaagcgcctatcggttttttaagctgtaggtttgaaatgcacgatgttcaatcataattgcttctgatatttaagaggagagggacatgacaaacttggatagatccgacggtcggaggtgacgggaccggggtagccaaaggaaccgaaggttgggaccgagcagcagctgaggtactgaatgctcggccagattgagcagacgaacgaaggagcgagtatactggacgcgatgagagattcatgatagcagatggtttttaccggtaagaaagaggagagaacatcagagggaggtccggggacgtagaggagctggccgaaggtaaatgatttacgggaaaatcagatattacctatctcgagcacagcaacctcttatccacgtgacccaacttagccgattcgaatttagccgatgacatcgtcgaaacctatccgcctgatccgccggtccctctgccttcttgggtgttgagcgctatttgatcgcactcgaaattctgattaagcgatacgttcgacgctcaaaagcggaacctcatcgcacatcccttcatcttttctctctactttcctactcttcttccgtgtacctcaaacaggcatgctcctttctagatcatcaatcaagacttcatcttcctttgttcgagccatgacttcctctgctccccgatatctctccctgctcaagccatctacctctctatctagcttgcctgggtcgttttctcaggatactcttgcctccaagctcaagctcgcccaaccggatttactccgatacaccaactttgttgatggaagctgggtcactccatccagagaagatgaaggtgtcaacttcgaaattcgagatccagctagcaatgatgttgttcgttcagtttccttcgcgtgagatctcagagcagatactgataaagatttctttggattaatccggtatgtctagattgcctatgccccggatctgaatgccgaggaagtcaacgaagtcatcaaagtggcagacagcgtgcgcaaagagtgggcccagaccactgctaaggtgtgtagtacaatcagttccaaactcaagtttgcatataaatatcgaacgtcgattgactcctcgtggtgtacatgggtctctctagcatcgctccgacttgctgaggaaactaaatgatctgatgatcttgcatcaggaggatttggcaaagatcatcactatcgttcgttcgaatgtatttcatccggtagttcagcgagatggtccgataaacttatgacccaatatatgcctctttcaatcccttatcaacctatctctacaggaaaacggaaagcctctcgccgatgctagaggagaaattgcctacggagcctcctttgtggactggttggtttcttttccagcttatgtttgacccttgaacttggaatgaatcctataggcttatgtatcaaatatctccatgaaaacaggttttctgccgaagccgtccgaagctacggagataccatcccttccgccactcctggacttcgaaacattgtcattaaacagccggtcggagtgtgctcgatccttgcttgctggaactttgtaaggtcttgttatcttcgcctgcgggatatctacacagaaatgcttgtgatcttatcgctgattctgcctctcttttattctcgtgtgttcgtctgtatttttctttaacgatagcccaatgccatgattgtgagcttcatgtctgtttacattatattgtgtgtcaagtacatggccggaactgaactttattctcgatgaattaacagaccaggaagattgctcctgcgttagcagccggatgccctgtggttgtgaaagctcctcctgagacccctctctctgctctggctatggctcgattggtcgagctggccggattccccaagggtgttgttaacgtttgttcctgtttttcttgttgtgctttcacaccgcgtatatgctcgagtgttgctaaattagcctacactccatcgctacttcacgaacttagatcatcacgacagacaagaacaccaaggatgttggaaaggcaatgaccgagaaccctttggtcaggaaagtctcgttcaccggctctgtaagtctgattgtcaatttagtgtaaggacgagctcggacccataagaaaaggctgactgagattggtatattcgtcaatcgttctagagtccggttggaaagatcttaatgagccaggcttcgtctactcttaagaagtgagtactccgtcttactttatctctcgattgtcagaatatttacctcgatcattttgcttgttaccaaaaggtgctcctttgagctcggaggaaacgctgtgttcgcaggtgtgttggctgttggctctttcttgcgtaataccaaaatttgtgtaaataatcgctaataacctttcatgacggcgcaacacttagttttcgaggatgcagatcttcaaaaggctgtggaaggcttgatccagtgcaaattccgattgtctggtcagacctgtgtgtgctgcaaccgaatctacatccatgagagcgtgtatgacgagttctccaaattgttcatcgaggccggttcgtttctagttttccgtgctcgtcctctgtttttgcctcgcttatcaagccctgctcctacggatttccatatagtctccaagttcaagatcggatctggtcttgattcctcagtcacccatggtcctgtcattcactctcgcgcactcgccaaggttcagtcccatattgacgatgctgtgtccaagggcgctcgaatcgctctaggtggacatccccttaaagagctcgggcctcacttctatgccccgacagtgctgcttgacgtaccgcttgatggaacattgatgtccaaggaagagacttttgggcctgtggctggcctgatgaaattcagtagcgaggagcaattgattgagaaggccaatgataccgagtttggcttggctggatgtgagtatctgtacttttttctgattaatcggataaggactctgacagcactcgactcccttcgaatatagacttctacaccaaagatatcagtagagctttcagagtttctgaagcgattgagtgcggaatgctcggtgtatgtctcaattctctcaaacttgttacaaaccgctgagcacttgctaattgtggattacatgcttctctaaatctcacccttgaagatcaacactggtttgatttctcaggctgctattcccttcggtggtgtacgtcaaagcattcccacttcgtttgagatgggtaccatcagattctgactcgttcgtgtgtgtgttctaccaaacagatcaaagaatcgggcttcggacgagagggaagcaaatatggaatggcggagtacgagtaagtctcgacctttctcttgtactcctttagttgtgtaagatcgtcaactgattgctcgatggttttcatcattctgtcttgatagggtgaccaagttcttggcattgtctatctcgtaatcgaagctcgctatactcttctatatataactatcatcatatttgtataacaaacttggtactcgattgtaacagcagtggcccatacgctgcatttgaaacttcttcctctctctctttctctctctttgtcgtcatcaaatctatgagttaatatcaaacatggtggaaatcaatagaatttttgagaattgagccatacggctgacgggatcgaagaatttgagccaaccatttttgactacgtacagcaacattttccatcgcgtggcattttgaacgtccctcaaatacggcaggcaatggatacatccggcgatcaagtcgtttcctttttggggattccctcatcacatctcgccccagtagcagttttcgtgtcatactttgttctgatcgcttgcttgttcagtctggtcattcctcggactctcggcgcatcttatgcctctattaaatctcaatctcaagataggaggtgtaggaggtatgcagccatctttgggttgctgacattgggcagccagctccatacttggtatcgtgaggtttttttttcttgcttctttgcctcgatcgtctgatagtctgacctgttctgaacgaatctgtattacttcgtgttctcataagatatgatcggatacatgcgatggtcgtacaccaatttctatcagactttgccagcctctccttcgccatcccttcgagcgatctcattctggctactcaatacatctctgttcactgaggcatggtccatcgttcttcaacctgggacgccattctggatatcggatcacatcactagatttacgtgttgctggtggacgttcttcgtttatctgtcgatccaacgcccagctcccctttcgagcaaatcaagtggcagttcatctcacctgtatggatcaaaagtgggaaaggataaggctggccagcccgaaagttcatcattaacatctttgaaagatgaaaaatggggaaatgcctcggcagccgccgttctactactcggtcaggttgtggcgatcagcgtagcaagcaacatctggttcgtaggttgtgttaaacgaggtttccctattgtgggggacggcagggtccgggatgtgccagtcaaggtatggggagcgttgttaggaagttcaatctgtgtgggagtgatgcctttgacggtgaatcgtgagttgaagccttcttccaaataatttcttttgcttgaaggtatgtgtgaactccgtactgacttgactttgacaatatgcgctggatggattatttcagaaccttcattcctaacagttgtgagtttttgaacatcattacgctcccgaacgtagccttaactattgaattgactactgagatacctcatcacgccttttatctttatcttgggtatgtttcttttgaacagctcttgattatgcacgcactactcttcgttcctttccttcctacccgtctagccgacggcccctcgtccttcaccctcactccgacccaagtatccctcctcctgctcgttcctcctgtcgtttcctccatgcttttcaacctccctatcctgacttccccatccgtggcgcttaggacgttcctagcaggaaatcatgcccttcgatcgatcggctcggatgctgcttggtgtgcatttggtctggtcgcttgggccagttggaaggttaaaggaccaggaaagatcagtagaatagtttgctcattaggagccttctgggtgggtggagtcggattaccgttaggtctggattgaagctatgtatcgaacagaattcttagtgaacatgctttgtatctcccatgaggactaccatgaaaactgatacgagaaatgttcggctctaagaacgtaccgtcgggttgattacacgctggcatgaccgaataaacatgttagggttatgtgaacgtcattgacctccactttctagttgtttgttgaaacccatcgaaaaccatcttccttcctcaacgttcacttcttcaaagatgtccctggcttccgtatctgatacgatcaactcagctgtaggcgtgatccctacgacaccgttcaaacctctccagtgtaagcttgtgaaattcgtatattttctccctgaatgtgattggcatgcaggctgatgaccgctcactgtatcccgatttgctcttttcctcgccagctatctgccagcatttctgcgcgtaagtcatcttctcaactatccaagtccaatggatgagagagatatactctttgcagatctgatagaatctgtgactgatcacgatttgattaggttccacgcatatgccaacgatctctcgcgccatgttgagagtcagtctatacattctgcatcgtcatttgaatagctcatacctatctgacctattctgtccattggtgccaaggtcaccacttttgtacccacctaagcccggattttcatcagtgtttgatctatgatggaccaggcgatggggagggaaagtttgacgggagaagattgatcgggattgaatatatcgtcactgagaaggtttgttcacaaatactggcccgacgatccaccagtaagactttgcatggaaagaagaccaacacacactgacattcctgggtataggttttcaacacgttacccgaatcagagactcaatgtgggtgcaattcttatctaatatctcgcgcagtcgtttcagctactgcctctatgtaaacggatccgatgatcgatatggctgatcgattctgtgagaacgacatgtacagactggcactcgcacaattatgaggtgtctagtggaatgctcacccttctcggtatgaagggcgtacctggcttggctacttcctccgctgaacaaccagcgatgatagagttgcaaaagacgtatggaaagacgtacgtaaatcgctttaatatcaacatgtactggcgccgttagaatttatcgtttcatcccggttcaaaattcaagcatccatacatggcagtcggatatctatcctgatcttcctctaggacctcctcaattgatggtctcctataccggcccgtacgtccttgatacgtacatacaagattctcaaatactaagatctaaaactgaaaatgtactggatatacatcagaaaccaactcccagggcatttgatcgagaagcgagacaagcaatatggaattgatactgccgaacaagcaaaaaaacgagagggatacctcgacatggagttcgaaccaagcaagaaggctgatttggtgatgaatggaggcaaggtatgttgttgttctactcatgcaagcttgagtcgagattgcgcatattgagagaatagatagttgatcttaattgtggttcgcttgctcgatgagcagaaagtaagcttggacaaatagtgcctggaaatttcgataggatttgaataaagggttgttggtgagagagatgggagagcatgcttatgtattgaatacaatcttgcagtatgtatcaagtatgtatcgatgaacaaagaatgttagcaaaacagtagattttcaagacgaattcttcagtcgaccatacacaggacttcttgggttgtatgattgagtcgagcgtacttcatcatcatcattgatacagaccaccaattttaagcttcatatacctcttatcttgccccacaaacgtctttctcactttaaaagagagaaaggtgcttgaggctcgttcatccggaacgtgatggtcttcgtttgtgtaaaagaatcgatggcatattttccgttgaatcgaccgtacccagaagatttatgacctccatggggtagagatctatgagcagcccacaaattagcatatatatagacaagattatgagaatgagaaaagtagagagcaagaaacaaacccttggtcgtgtacggtattagagttgatgtgcacagcggaacattccagcgcttttgcgacctgaatagcttgtcggtaatcctagggcatcatgtcgaaagtcatcaagctcgttatcaacaagaaaacaagaaaatgtagtaagaatagagcctacctctgtccaaacactcgaactgagcccaaactcgctatcgttggcaatctcgaccgcatgatcagcatcgtttgcacgaattatggagagtaaagggccaaaggattcttcaaagtagacgttcatctgtgttattgataacaaatagcgagaacagataggttgagaggaacataagctaatattcatatgagaccaaagtgagtagaatatcgatacaaagcgaacctcagaagtgactccctctagaacgatgggttgggctttggatgaatgacatttttccaagctgtggatttcgatcagagaagtcgcgccctgagtgacaagatttacatatcaaaagacaggaccttggtaagaaaggtggataacctataacgaataagaagagaaataactaagaaccgatactaaccttgttcaaagcatcttttaccaagcatttgactttctcagccgatccttctcctgacaaccccatctcagcaacttcactttcatcagtcttgagtgctttgatcagatcagtgaccttgcgtttcataacggcaacaaagtcgtcatagatggaagagacaacgatgactcgctcagtggccatgcaagtttgtccggcatggaaactagaaccaaagagaatctagattcagacagatggtatgagagccgctcagacaccactcaaaagataacgacgagtagaaagaggttagaatagtaacgaacagtgtgagctgctttctctatatcggccttttctaaaacgactgcagcagccttgccgccaagctcgagaattgcgggtctagattgagcgatatgatattatattcagcaaacaagtacatgccaatagatgcatgactgctcacttgatatatcgtccacaaattgatccaattttggatcctactgctggggatctatagaataggtgttgagaaaccagaaacaaagcaaacacagttataattggctgtttgattcgaatgttaacatatatatatgaagggcacatacccggtaaagttgaccatctacgattgaaggcgttccaggagtggttaatgattacgaacacgttcgaaagctacagtatctagatgatgggcaagtcaattaatgctcacctttatatctttatgcgcgatcgtttgctcgacgagtgacgacacattgtcaggatcgaactgaacaatgtttagtacgccatctggcaagccggcgtccttgaataactctcccataagagaatgtgtatacggaatcaacggagagcctagttaaggtttgaaaagttttgatgcaataatataaagacaagagacacgttcagaagagtaagaaatacattctcgagagagatgatgagtttgagtcgccaaaagagagcaagcacctttgagcagaacagagttgccgcaagcaagaggccatacgattgctcgaatagagaggatgagagccatgttgaagggagagattgaaaagacctgtaaacgttgacagaagtcaaaagaaacaaatactttaacttcttcaggcatgtaaactttggagcagatgaagcgacaagaacgcaccgttccaaagggctctcgagtaacaagtgctaaggagcctggataagaaaagagttattcagccggaataaagttgattgagcatgtatcaaggtgactatagatttgatgcgaaggaaatgagattaccgtcaaccgtctgaggaatatcgcccgtgatttgagaggtgctattgattggatgattcgatggagagggtttttatcaacagttttagtgatagattcgacagcgtccgaacattacatagtacacagcaaagcgagaaaataagatcctacattgcagcagcttcttctattgagttgatgctcaatttgaagtcaacatcctgtgtgagcccagtcgcgctcgtctcagcggcttgagcgtccctgaagattgctttccgttcatgaagcagctgagctactctggttaggatctgtcgacgctggaaagctgttgtagatgcccaagttttggctccagagcgggaggatgatatgattttggagctgaagttgatgaagaagaaaatgagagcatttatcaaattgtcgtagcaaggaagtggactaggcaacagaacgaatcatacagttgagatgcatcacaggcagaggcctgagagatgtctcaagatatggaaatcaaccagtgatgagatgaatgagctagtagtattgcttatctatacacttaaaaacccggtctaacctacctgggtagcgatttgcttagaggccggatgcctaacctcaaatgtaccagaagtatcaagaagtggtcgattattcacccaaagaggtgcatacttgacttctgcagcggaagcgttgcacagtgatatcgactgagcaaacaacctccttcctgtatgagcgctcaaggtaagagctacagcatgttgggataacctatggatcatctggaacaaataaacacgagaatcaacgactcggatgatgaacagaagaaaagaatgtctggctgtttcgttcatctccgaatgatagcggtgtaagatgtatgtggcgataataatcacgtggctcggttaaacaaacccattccatacacatacatacactcgcttctatctctttctgtccgtcagcttaaccttgtcagactcttcgtactagagatggcagactcagagtagttcgtattagactatgctcctactgaactgacaatcaagatcatcttttttgaccaagctaagctaatgatgaaaacaaaacatccggcttttgcattcagcctagacacatcggctcctattgttctgccttcggtcttcccttcacatagaacagatatagacgacgaccgagacgacgaagacagaaagtcagatggagaactcttggatgagcttctggaggaggaagctgatttcgattggggaggctttagagaagcaagaatgcagcaaataaaggaggagtatgtgtttcgttccttggtgctgtagtgacacacatccaggctattcactgataaatcttatgatctcttctctggattgggatatttgcagagcgcaaaaacgtttgcttttacaaaatacccttcacggccgttataccgagattaagaatgagaaagagctaatcacgaccgcatcgtgagtgaacgcttcctttcaacaaagagcatacatcgcttcaaacgctgagtatgatgtcgttcaccttcttgtttgtttgatgattacagaaaagagccatactgtatcattcactttttccatcgagacttcagacggtgcaagattatggatagacacctcgaggttcgcttcttggcttgatatcaacctcatccgctccgttcttcctcgactgacattatccaattcgcgctcttctgaatacatcaa

SEQ ID NO: 3152 - DNA, 7292 bp, Xanthophyllomyces dendrorhous
aaactactgcgtcagaaacgttttacaaatcaacatgacgttttcattcgtatcgctgcaactgagacttctggtaacatgcagacgaagggtttgacacagaacaggaagacatgaaagtaagtatgttgtcgcggacgagaatgttggttcgaggagcaaaacatgacagaccttatccttgaaaggaggaagaccagcggctatccttgttcctccaacgagaccacaccaatcaagattgccacctccgttggctcttgcggcaatcaaatgctgatgggccactgtacgaagacaacagatggccatgatcagaatagaaaaagaaatttagttacagcctagattgagtacgtacaatcgatggtgggcattggcacgttgtgctcctcggcgagtcttcgaatgtgaccggcatctttgatacctccctgcagagaaaagccatcctctccagaatactcattctgtcgtcaaattaaaagaagcaatgttcaggctagttgatcgagcggcatacagtcaaccaagacctcgctgcataccttgaggatctttttgccgtaagtgaggaatgagggcgctgggtaaagctctgtttcaaagaaagagaagatttgatctgagaaacagaagccagacaatagactgaagaaattctacagaaggtaacgtaccctgaatgagcttgtacacgttctccttaccgactccgctttggtcggctgaagccacatgaagccatacagaggtcagtacagtctgaccacgactctgtgcctgaggctcaagataactgtcctagacttgagaacaggactgaccaagtgtcatggtctcggagagcatctcgatagtggccaagatcatactgtttccgaccaacttgaaggacgcagccttctcgacgttggacccgagatccatgacctttcggccaagggcaggaatctgagattgagaacagaaggatggagatgagctagctgagccgggaacttgtacatcatgggcgtggaaatactgaccagaacgtgagacacgctctttcgggaccggtaatctggtcatgaagagaagaagcgtccaaggacgtcagtttggttaggctgttcaagtatagacttaaccgaactgtcatagcgactcacctcctgagatggcaaacacaagctgagcacgagcggcagcatcgggccgtccaaacgcaggacaagtgaggaaatgacgagttgacttcttggaggcctctcgctcgagtttgccagcagtggcctacgatccaaagaaacaacgtatgtgtgaaagtaacataggaattgatttgattagttttgtatcacaacaagaatgatagaggattgactgagcagaactataagcaggaacaacatacggggtagatggtggaagtctcgatgtaagtcgtatgcttggtaggtcggctctcctgaggttcagaagatgagacacagctggtcagcatgagttcgctgagccactatcggatcatcgtttaaagggaaagagatatgactggtactgacttcatggctcttgaaaagctctaggtagatttcctcgacggcctcatcggttcccaagctggtaaagatgtagtcgcactctgaagagtcgatcaagagtaatctatcagcaacagaagctgcatctactccatgtacttaggcctgaaagactttgagacgattgagacttactggaaccgatctcggagacgtccttggcaacctgaatgggaacttcaccatcagctctcttctgggtagtttcgagaaacttgtcggtgtgctccttggttcggttccaaaccaacaaaggggcacatccttggttgtgaacatgaacggcgaggttctgtaaaggtttcagaagaaggtgattgtcagacagtgtttgttttaggaactatgatcgagagatgagggcgaggagatagaaaagcaaagaaaaaagggagaaaacgaaaagtggattgaataggtacacgggcaatcaggagaaggaaaaaaacgcactagagccatgtgctttcccatgtttccgagtccgataaaaccatatcgcttctgtaaggcgaaacggataggaacagaaaggagaatcacgcaagatgaaagaaagagacaactgtgtgagctagacgccaaagagaatccagtgatggaaacgaatcaagaaaaaaaaagcctcacggtctctcggtggccagccggggaagaaggtcgagagaaagggttaggtgcttcttgaacaggagtgtttgctccagactgagctgcagaaggagtgttgggagtgttgggcttgagtccgaccatggttttgaagattatgtatgagtgagtgtgttggaacaagttgaatgagagatgaggcagaaggggaaaaaggggaaggccagacttgagcgcgtcatcttttgccccaactgagatggctagtcagccttccagcctgccaggccaatcgattcgcgctcgtccctattgttagggtcagttccctaggtacttgatctccttcgatcaactccattcttccagtagcatcccgttcgttcttgttcttattcgcacagtgacatcgaccagcatggcataaccaactcaacaaacataacgacctatttggagacattggctaaccgatagaatactgatctacttgaaagaagaagaagaaaacaaacatcaactgattaaaaggcatctctgtcgatcaatattgacgtctgaccggacctttgtgcctgcaactgatccaggcacgatccatcaggccgattgttacccgaaggcgagagcaaagaagaattaaagtagcgcccatccgatccgctcacccattctgatcatggaggacatgttgatcctcggctcagagtcagaggggagtctggatgttggatcttgcccttgattactcattgcgtaccttgtggtgaccgtgtccgcccacgaaatgttgaccggccttttttttccttctgctgctcctcctctagcttgtttcacccagttccttgtgtccctcgaaccccgagatgtacctgttcatttagaaccgaagctttcacaggaaacaacatgatccagtctccatccttcatccctcattcatattcatctctcttcccctctttctcttctgttcacctgtaccatccatctagacagattcgatcaaggttttcttcgattctctctcgccctcgttcttccttgattttttccgtctcccttcagctccttgtcttttccaagaacctcctagccacttatgtctggtaccgttctccaggacagcacccggatgaaggacagtttgagcccttcgttcacgccggtgcctggacagcctgggtttccctacagcgacgcatgggacaacttttccaacagaacttctgccgtctgctctgggatctcgacgtttccggcagaagcctatcggtttggcgctagcaaccaggccccttcggtcaatagacagccatctgacgagtcaatggtttccagtccctcgtcatcggacgaaaccggtctatcgtccctgccgagtttggaaggcgtcgggtcggtgccttcgaactcttcaataaacagctccaactcgtcaacgttgaactcgccgctgttgcacaagaagtctccctccagaaacaagcacttccttcgtctgccccataccgtcatcaacactcctatccctccttctcttctcgatcctaccagacgaacttccttgccggtgtccgctggcacttcttacacttcgaatttcaacattgctgtcaatcgatcggcttccatgtcctcctctcagtctgatgggcattcttcccttggtcagcaggatactgcgctggcaacggacgatgaggatggtgaaccctccagcaatggatctaagggcacccggcctcccctcaggcccatggtgcgcaaaggttccaaaggaggatggccttatgataaagcgcctcagtcagctggttatggccatgctcttggttcttatactggcccttcacccttgtcaacttctacgtcggctacatcttactttccaccccaagccaagtcgatatacccagcatataagaatgtcgagggctattcatatgatccttccgttcaatcgaccaaccagtctcatactcctcttgtgggaatctccaagtttgcgtcttaccaacagttggcctcggctcaggcagcctccttcaacgctccacccgaacaaaattcgctggctccgcccagaggggtcaaatctcaatcttcctcacttgcgccccctccgctctccataccggcgagcaattcaggtccgatcactcatcttcttcttgatggacatgccctcaatcctctcttcgagtcccgatacgatctcagtgcagttcttgggtcgggagggtacggcttcgtctgtgttgccgtagataaaagacgcaacaaggaagtagccgtgaaattcattctgtcgtccaaggtacctgcccatgcatgggtagagtggacctgtcaaggtgagagcggagatggtatgcctcctttgggcgggaaagttccgatggagtgtgagctcctcagacggatccgacaccagggggttgtccgaggagaatgggtatatgcagatggaaagttcttctacttggttcgttactgtctactctttttctcaacgtatatctctcgagaaccgatctcaccatcgtgtgccatgtcacattgacaataatgtctcgacatcaggtacaagagcttcatggtgcctcctggtgtccatcaacacctgccaccccggtaacgcccagtactccctcgactcccgccagtccacacatcacggcagccaacctggctgatgtgtcctcaacgttagctttggatgcaactcgattggcttcacctacaccattcgctccttcgtatcctctccctgcctcgccagcttgtggtcctccatcgctgattcccaatggcacagtgccgccactctctggcttggaatccaggagaccttccttgaatatggagagaagaggaagttgtgatctgtttgaatgtgtagaagcaaacaagagatttagcgagcccaaggcgagaggaatcttttttcaagttggtaagttcttctgcgttacgcatacttatcaagcatcatacactggctcatgacttcggctgtttgggtcactagtcgaaacggtctacgctttatcaaaggaaggtatctatcaccgagatataaaggacgaaaacatagtggtcgaccgaaaactcaaagtgaagctcatagactttggtagtgcggtttgggaaaaggagccggagccagtgagatataaggacttgtgagtgctatccttaacgttctctcttatcgagaaaaaatttatcaaactgtttatgcccgttcgtcagttttggcacgaacgcttatgctagccctggtaagtataacttccaatctgccttcggctctaaggccacagctcatcgacatttgtttattctcaaccctggattcatcagaaattctgcagcgcaagacttatctggcgtctgaggctgaggtctggtctcttggcattctcctttgcatcctgatcaccggcgagtctccattctcctcgtcttctaacgccatgataggccgtcggtcgcctctaaggaatggggtcgtcatgtccaaggagctcgttgatctgatcgataggtgtctacaagtcgaaccagagaagcgcatcaatttggaagaaatgagaggccacaagtggtttagatcctgagctctgctaagtcctcctctggaatttctctttctttctcctctacattatatgtttttttgtcctctatctttctttgttctcaaatgtatgttttctccatttgcatagtcgctgcttgatttcttcttgctgagaattgcagttgtcgttccattctctcctcaaattttgtcttccaagtaccaatgtcgtcatctctacttttgacttggttcccataactttgaaggagcaggcttctctcttcttaatgtttgcttcttccagactcggtggtgatacccaactttctaaacttatacctatcctttttctcccatctcaaccgattccaatctcgtagttagacaaactgtagccaacattcaatccatccttattgtcctctctacaggacatattataatcgttcgacatcccatctttcttttttgttccattctctgataaattcaagacccagtgttccatcagatgtgatgtttgtcttaatttgaactaaattgtcgtctatcagtggggattgaaatgcccatgaatctgtacacttctttctttctttctccctcccatgtatgcaagaaagcaaaagtgtccgaaaaggcaagaaagaaagagatggaaggttgaatggaagaaagcaggatggtataaagcaagaatggataatggatcaacagcgcaagacattgtaaaaatccgaaaaagaagatgaggagtggacaagacgatagaatgaagaaaaagagagcgaaagtcgtaggatgaagttatagcacaaatgaggggggttcaaaacattccaaaactgatagacgtgatctatactgtcgttgtcgttgtatcggtagcgagatcagccggagaggtgtctagaccttcagaggataaccgtcgagtagagcgatcgactggtgtatccaacaactatttcgtttgttcccaagacccagaaaaaaaagagtagcatcagtatcgccaatgaagaaattcagcaaagaacaaatcggaatctagacatacctccttcctgagttgttctccactcaaatgttccgactcgtcctcatctatctctgccgctcccaataagacaccttttctaaagacctcaccctcctcctcgatccaatgggttctcttcttatccgtcagagaatcgatagaagatctgctttctttctcggtccctcctgatgcatccttcttttgctctgccaaggcctgtccgtccgagcttagcacgcgtgtggtctggatggggaactggtagtcgcctggttccgactcgttctcatcgtccgaatcgccggcaatactaaagttcgggctgactgccatctcgttcgatcttgatgaggaggaggatgaccctcgatgaggaggagtgctcggaacctccaaagaggttacgcccgagggaccgagtgcggaagaagatttcgatatcggattcttc

SEQ ID NO: 3153 - DNA, 3646 bp, Xanthophyllomyces dendrorhous
accgagctttcttctcatcggacgctgcctttgcccgttcagctcttgaaagctgtgtggtcaaccgatcgaccaacccgagaaggacctgcagtttgtcttcttccgacgacgcttgagtttcttgaacggccgctgactgttgaatcatctcctccaaccgttccctcagcgccttggcttgctcgatcagctcgaggatctcatccaacacgacacctagcgagttatgaacttcgaccgattcatccagcgaaacgatgagttcctcggaccgagtgatcaccaccgtagggctatattcgtacacggtcaatcgggcttttcccgcaggcgtcgatacggcggattgaccatcagcaacggcacgggcggtgtctgcttctttcacaatccgggccagagtagatttctgaataggtccccagacggctgcacgggaggctttcgatgttgttcgctcttgagcgagctcagtatttcggatgcaactctatgaaaaggagaaaaaaacgagtaagacgaccagctccgaccaagttgcccaggttagggaatagagaaagaatgaaacaaagaaaaaaaaagaaacaaagaaaggagcctagacgtgcctggaggatatcttgagacaacgtagcaacatcctcattgttgaaaggaatactaagatccaagcaacgcatcagtcggttgcttcggagtccgacagcgagtgccattattcctgcaacttcaatcccctggttcatagtcaggtccagatggagcagatgcctagcctctgggaagaactctgctagcgcgatcgcgccttcggttgttagacctgtatcagcaaggaacagtctttttaggttggtgttgagcgtgaatgatgttcggagaccgttgatctgttcagtacatatgagatgtggttcatgtcaattcggaaagtttggtttggacttcgtcgtgtgaatagttttgaggtctttggggcttactccttcaagtccaggaccggagcacgggttatggttcaaatccagagtgtctaatgtagagttgtatttctacaaaaggcacaggacagttgagatgtttgagtaaccttcagatatcagatggatctagcccataattgaacataccaatgcttcagccaatgctgctagtccgagaacatcaatcctgttttcagctaagttgatcatcttgagcgtccggtttcgcttgaggacctgtgcaatatacgtgactccgccctgatggagtcagagaagaagggtgataaaacatagaacgagaacttggtaagaggtctgagttgtgtttcacaacgttctttttttttcttgtcttctgtaatcaacgattgacatacgcggagatcgtttcctttcaaatccaaagtcactaggtttccaattcgctgcgcgtcatcaagacttcgaactctactctgcatcatcccacccaatactctgttgactgcagacatcgccttgccattcccttcctcggtttgaccaatggatctgtcgtctcttccggttggatagccttccggcattgttcttgatgtgatcccacctcctgagtttgatacaaccaacgggatggtcggcaatacacctcctgggccgttcgtcagatcttcgagttttcgtctggaacggggtgtgtacggagtatatgttgtggccatcgacgcttgctttcctatgaaaccggaagacttgtcggcggtagcgaagggcgaagaggaggaagacgaaggcgaagagggattgacgtaggaaggattgaacgggttggagctggaagtggtgagattagtgtctggataatccttgatcattagcgccacagctacaccgccaaggctgttgattttgtttcgacgaagagaaatatttctgatgttggacgatcgaacggcttgggctgtatgatgggagcagatcagggtgatcgttagtcggaacgcatcaaactcgtgttccttgcctgagcacaaataaacgactccatcatgggtatagattcgtgcacatacctagactctcgagtgcattcgctcgtagcacacatccatcgactctcaacgtctccaatccctgcctctgtcccactttcgtgccatcatctcggaaggactttgttcgatcgagttccctctgtttcaacaaagaaacctgcctggtctttttcggttcggcttctactctgacttgtccctcgacttcgtcagactcctgatcgtttgataccaaaatcaatccaggctcttccgtgatcgctagactctctcctcgaacatttgcctccaaatcttcggcctggtccggtcttttttgcttttcttttggacagactaatgcttcggccaatgcatcgacagattttttatcaaacgtgttgtcggagatatcaagatcccttagcgatagattttgtgcttgggtgaggtagacggcaatgatcttccagctcgtcgtttttagacgacgattcgatcggatagatagtgttggtagggattgtgagtgaaggagtgcgtgaagaatacttttcagggccttttgatgttcaatcagtttgttcgaaagaaaggaagaaacaaaggaaacttgcgtcagagaacgagtctgggaagtcttgacggatagaaagaaaagttttaacactcacgtcatcaaacagatcacaatcatcgagtacgagcttggaaagtccccattcaatggccaggacgtcggatagagcatctgccgtgaaacggggtaggtttacgcctgttaagtcgagtactctaggagtaggaggcatcacatcgcccacttcctattgattcaaggagaaagaacgatgagcgcacaaattcagtgtctgactcgttagtcacccaagcagatgtttatccaattccatcagcacacatactcctacgcataaagagggacacaccttgagcgctctccaaatacgttcgtcgacgccttcgtctcgcgccctacatgcccgctcgtacaagtccaacaacttgagagacgaccaatactgccagccttcttcctcctgaagttttgcgagatatttcgcttctacttcttctctcgactgtgcgacggattcagaatacgggggtaacgcggacaaaattgggtacacgactgatatcgaaggcagatggaacgaggctcgtttgaggaagacggaacgctccggttgaatcgagtcggaagatctagcgggaagcgtagacgagtctagagagtggtttgatgccgatgcagtgatttctgaagaagtagacgaggcagaagcagtattctgagcaaaatcggatgatgaggactgctgaacggatgttgattgaatgttgttgagcgtcatagtggctgccatgttgagcttctcaaacgctttggagaaaaacgcgccggctgctgttgtcgctacctgaggggttgctccgtccccgttcgactgatactgttgttgctgcgattggttatgctgaagttgcccactagtcctagtatcggccgcaccttgagaataaggtgtctcacccatcagtcttgctcccaagctccctacgagatctctaggctgtcggcttatgagtgaagcgaacactccttttggtgcttgt

SEQ ID NO: 3154 - DNA, 40330 bp, Xanthophyllomyces dendrorhous
aaggacaggaggcgtggggatttgtgttgagggctgaaggatgatgcgagggccactcgcaggaacggaaccatcaaaggtcgatgaggttgacgatggggtacgcgacggtttgcatacagaatcggagacagaatcaaacgaggtcggcaactttggatctacgcgagacggagaagatgatgttgggaccaaggctggagtcggagctgatgaagcctcaacctgggtgccggtcgagctggcgtctgatggtgcgtccatctgtaggtcaaaggtcaaatcagaccaagagatatctgccggatgtatgttgatagacagaacgatcagatacaatctatgttgtccggcaaatcacttcaatcacaagaaagaggagcagagagaacaacaggagagaaaagcacgacacaagcgtgttgtcgtgttgagaaggacgactgatgcaaagaaggaggctagacgacgaagagagagactctggaagaagagtgccaccaaacgatcttatctcacacacacagagagaaagagagcacgatgctactaacaggctgggaacccaaagaggatttgtgtgtatggtgacgttgatcagaaggtgagagatgcaagcggaaagagaccagaggcaaacagaagagagatcgggccggggcccaaagagtccgttcaaaaaaacgtgttacgcgtaattgtctgctctcctttcttcttctgaggatgaacatgtcaagtttcgttgcgcttcaatctggtttacttgaatgcgcatagctcgtcacaatcgtatgataaccattttagccaaagttatgacgagcatctctgaaggcagggatatttgcggttacaacgcctcagtatagaaggtttctatcttgcgttgttgctggagctgaaaggaaacgaaagaagcagtcttggggtttccatatcataagcaagatctagaagaagtattgatcaatcttgctggatcgcaagtctagttttaacagaaggtacgggggatagagaattctatgaaacataaacgccgcatcaattctcaaagttgacggtcagtttctgcccaagcctagattgatgtctgacctcaagcttctccttctcctcgcgaactctttgaactgttgtcccagccctcttaacgcttcggctgattccaactcttccgcctttgttttccatcctgtacttttaatatcgcttccagctcactgagcgctttttgttcttcagccgtcgcggtctgtgaccctatcagatgtccaaaggtagtcccgtcgagaacgatacgagtatcggaagcagaagtggtaggaaggtcccggaagcgagattcatatggagaggctaatggtgagttagcaaacgatgttgaggttgaagatgacagattgggtcgcgtgcgggttgctgctgattcaggttcctcgtctgccacaaatccaggaagagggaagtcagacgagctggccgactggattcggtctctactcagagaacgtctatcctcatgtgactgaaatgaatgatcgtttgatgatatgagcggcggctgcttccttgaaggttttgatgatcgtttcgagcggaaagacggatttgaacggccatccatgtcatccggaggtaaacgtatatgctcataggccttttctgacctgttgcggtcaccatttctgaccttgtcttcgtttccgttgtgagtgagcttcatgccaaactgactacgaccgccattcttagaggatgcctgactggaagaggctgcccctgcaaattgagagaatctatccgggatacggtgcgacgagactggtgaccgaggtttaggggcttccgaagctcttgaggacggccgaggttgtgtatgattcttgtgtatatcaccgaaagtaatacggttcttcttatttggccgaggatagctcgatgcaagtgagctagctcttggctctctcaagtggtgttgttggttagaaggagcttctgctgcaggtgctttcgaaggtgccgaaggacgtgaagtcgaacgcgaggaaagggaggaagggcgttcatctatcccaaagagaggcctgaacgaaaagggagcagagtcatatttaggcaaggacgtatggaaagagacccttgacgtttgagtggctagctgccgaactgctgagcgtcctccaaagagtcgtgtatgcatcttgtctgatgagtccagaatttggtgctcttagcggttcaatttgggttgaaagttcaaggggactgtgctcttcgaaggcacgtgagctcgtaaccctaggagcaatacaattacataagcagattaatattacataattacctctgcacatccaaatgacgtaacagggcagagtctcggctttgctctgacgtgcgttgtcctgctgcgcgatgcacgtgtaggccagccaggcaaaaaaaggcacggtcggccactcagggcgttgtcggagatttccttctttccccacttttcactgctcttgtctcttcttttctcttctcttccttcttctcaccaacatctccttctctttttctttcagtcttcttgtctttattggtctctctcatctcctcgtctctcatacaacgtctcctttgtatccacgtacagcaatcttctcgttcggtacaggatctcttcccttatcccttctacccaaatccatctttcctcgcctcttctctctttcctcttgaatcagtcaacacatcatggaaccctctctcagttctattcaggagcctcctcaagggcccaacgtctctttggaagacatgcgagcccgggtcaagtctcttgaagatgatctcaagtcgaaagagttttctctaagtggtcggcttatccatgtttgcgtgagtggttgcatctcatcagtttttttttcctcagctcctatctcctttgcgtccctctctttttgtgttgtcgacccgaggctcttttcagactaggagagaactatttgttctatattgaggtagttttgggaatgatctgggttgatccggtttaggagaagaatctttctgacaagaaaaagcatcctcagtacgagtcctgaatacaaaccaactgtatcagatcaaagaactgagacagagatatcaaacttgtcctcttttcgactcgagtgcaatctgttcaatcatctttattgacgttgttcctttctcgtcatttatctcactctcgggatgcccgtcctctttctcagcactacctccctgtcgttcctgtcttatccgctactgccgaacccgaacccaaagaggagacccccgccccagttctcaccgctcctgctactcccgccgtcgaagtccctgcgacttccatccttgaggatctcgcaaaggcaactaactcgctcgccgcacaggcaagctcgaccgccgcatcggtcgcctctaagttgacggcctcggacgcctcatcatctgctctctcgtggacggtgacccctcgacgaggacacaccgcgatgaactctggaatccagtcactctctgagactcacaagcaggtggtcgtcggatggaccgggacgttggagagccagtcgaattcaaccgaaggagaaagccacgtcgagcaggagactagcgagaccgataagctcgctctggaggaaaagctaaagggcgagccgggagcacagttggtgcccgtctggttacctcccgtcgtcgccaaggagcactacgagggctactgcaagtcgagtacgtctctaatcgtctagttgtgccgttcactcggacccgtctcaattggcccatcttcttgtttcttatctagctctctggcctttgttccactacctgctgtggcaggatggtgagtcatacttccttccccttacatcacgcactttgtcactcattcaaccatttgatcaatccacagtcgcttctgagtatcccagagaggatcctagttttgcttcgtactacaaggctaacatggcctttgccgagaaggttgcttctatccacaagcctggagatttgatcatcgttcatgactgtcagtccagattcttgccccttctaaaactctgtggctgtttgcaagaccactgaacctacttctcgtttcacagaccatctcttgctcgctcccaagatgattcgagaactacttcccgaagccaacatcgccctcttcatccacgctcctttccccagttcagagatcttccgatccttgcccagtgagtctcttatcaatccacactctctgcttgtttgcgcttctgacaagtcatgttttcttcattctcagagcgaaaggagattctcgagggtatgctcggcgccaacttggtgtctttccaggtaagactttatttatgtagacgtcttcttcactcaacactgacatagctcttgacaacctatgcatatagacctactcctactctcgtcatttcatctcgacctgcatccgagtttgtggattcgagacgaccccagccggagtggaccacaacggcagcgttaccgctgtctccaactgtgctatcggtattgattgtgagcgggtgaccgctgaccggtaagtattccgaccggatgctgttatccgagttccagccgagccagcgcttaattatcgttcattattttccgctatcgacatacagaaaccgaccggaagttgcacccaaagttgaggcccttcgatccctatacagtgggaagaagatcattgtcggccgggagaagctagatgtgtcaaaaggagtgattgagaagctccaggcgtttgagaagctgttggagtgctacccagagtggagaggcaaggtcgtccttatccaagtcacccagccgtcgttgaccgaatcaaggaagcttgagcgacagctctccgagctcgtcagtcatatcaacggactttacggaagcttagactttactcccgttcatcactagtatgtctatttgattcccattctctatagtgtcgaagctgatgttatcactcttgtccttgtccttgtccttgcccctgtccttaccgcctcagccatcaaaccatcgaacgggacgagtactttgctcttctttctgttgccgatctccagctcataaccgccctccgagatggaatgaacaccacttcaatggagtacgcaatctgtcaggacaagacgaacaagtcgcctctcgtcatctccgagttcatgggtaccgcctcatcattcaactctgccttgttggtgaacccgcacgatgttttgggcgtcgctcgagcgatcaaccaggggcttgtcatgagcgaagaggagaaggttgagaggcacaaccagctgtatgaacaggtcgtcacccatacgagcgcccactgggcggctacgctggtcacccaattgttgtccaatatcggaggcgacaacaccgctcaccagacgccttacctagaaaaggtggacatgaaggcgaagtatgacaacgctaagaagagattgctgctctttgactacgatgtaagtgcccaacgaacatcgtctttggcgtgatccatctgcgttttcttcagaaatgtatgcttaccgctcttctctgattttctctctagggaacgctcaccccgatagtcaaggttccttcccaggcgaccccgacagagaagacgctcaaagttatcaaagaactctcaaatgatccccgaaacgtcgtctacctcatttctggccgagacggtgatttccttgaggagcactggggacacgtcggtttactcgggttgtcggctgaacacggatgtttcgtgcgacctccgggatcgaccgagtggaaggggctcacggatgcgttggacatgagctggatgtcagaggttaacgaaatcttcaagtactacactgaggttcgtgcccttactttcctctgttggttcgaagatctgcctttgcttactctgctttctcttggatcacttattatttcttgctaccagagaaccacaggaagtttcatcgagaagaagaaggcgtccatcacatggcactaccgatcaagtgatccggactttggatcgttccagtgcaagcagtgccacgatctgttggagagctcgcttgctactcgacggcccattgaagttttggtaggaaagaagaacctggaagttaggcctttagctattaacaagggagagatcgtcaagcagattgtgtacaaccatccagatgctgagttcatcttctgtgccggtgacgacaaggtatgcctttcttcttttctttgccttttgcttttgccacaaacatcatgctcatctctcttttgatacgatatcagaccgatgaggatatgttccgatccctccgaacgatcgcctctagctcctctactatggcaccgcccatcgcggtcacctcggcctgtactgcagaggaggcggccaagttcccagacgtcgagacccatattcaacccgagggcatcttctcgaccgccgtcggaccgagcgcgaagaagacactggctaggtggcacgttaccagtcctgaagaggttagtcttcctgtgttcggttgcttgtttagcttgggttgttctcgtactgattgtttaattctttgactactcaatatcaggttgtggacatgatggatttccttataaactaatctttggccgtgcttataatctcttctagttccttctagtatcatcatgatctgcttcttcgatgggttgtcttttctctctcgctaaagaatcctgtcctgcatgttagctagttgactgtgtatcgtcagatccaaggactctatctcttcttctcttttccttgtttattcatatattttgattgttttgtttctcctagtgtgccttgtactcgatgtagcccccgagcctatctcttttccttggtcttgtgtctaaatgtctttccttgtcgtaaattttgtttcccatttcggtctcttctctatctattgagtgtcatcggcttcgtaatcatttggatgtattcgaggttgtcatttgagagatccgtcgtaaaatacaatacataagaatcggctcactttgtttgagtcaatccagttcatagtactcgcctgaagatggagtattgcttcacagtctcctcaacttgcccatgaaaagatacatggttccaagtacaaggataaagacacgtaaagaagaatacgtggaacaagtccggccggaattcgacgtttcttacccatggcgcgtagttcgtcttgtcttcgtgagtaggttacaatagttttgtggccctttctgcccgcctccttcctctccaatcccccgcttcttcttcttttccattctgacccctttctctttctctttccccttcaagtctctacgttctccctttagaatcttgacaatttcttagaaagagtcgcactcgacactgtcattgttgcggctgatcctctccattcttcggctcgtttcgcatcggtttctctggagtataccagttcggatttataatcgaggctctcatccggtcgtttgactgctccacatcgccaaaaccagtttatttggtccttcctagtcttctttctgtttctcatccaacgatcctagacgtgacgatctcttggctgtcgttctctgcataaacttataactgatcaatcttttcatcatggctcccgtgagacaacgtcttttctttcgctgttatcttcttcttacatcttgatcgaagccatccagactctgactatcttttcaattggtatcgttcatgttatatgtcaacgggtggcaaccaacggttcataaccatctatagacacgatctcgacaggctctcttcccagtttatgtcgatcctgctccttcactgtccctttcgtcttgtaacatccccagtatagaacatagctctgttcgaacgtcgcctcagaaacggaaggcttcttcgaagtcggttccatcgttcaaagaaaaaccggtagacctcgtcgtcgttgcaggaaatggactgaaaaagagggatggaatgagcgacctggggaaggttgggaagaacggggagagggtcgtaaggagggaggtgctgagagatgtctctcaagagtggggtgttgttggttgcgagccggagggcttcaagaacgctgtacgtttgtgactcttcagttgtccgagaacatagacttgcgatcgcaacatgctcactcaaaacgattttgtcgtagtctgttatcaagaaaccgtttgatcccgtgaagcctggcaagcttcggatcttcgccgactctgcatcccttccttctagccggccatcagcatccatcaacaccaatgataccgtcaccgcgaccaatgctcaaccttctcgcaaaccgttctcagtttacacatcaccttcacgaacgacgtctgctatcacgcggcctaaggggcttggtcttggcgggccaggagccgctcgaggccttcgaagttgaatttagccggatctttcctcatttgcccgtttagaccactatgtaacagagagtgaatgtcttgctgaaagcttgacaagcttttttctttgttcatcgcatcaatttcttcctcttgtttttttcctttccacctcgcgactgtcttttcataaaaagaatccatccaatcatctttggccctgtaactgacccatcctgtcctatcctatcccttctcttctcaaaactgttcttctttctttcttctagatgtctaccgtcttgtgtttttgttttttcttccctatcgcagatatttcgtcggtccggctttgtttttcctatctacaagctgcgcacacagatctacgcgactcggagcgagcgggcgcgcatcttttgatttcttagtctttttcttgcgcagtagaagaaaatcagtcgcgtctttctttcgtacttcctactctttctctctgtactcgtccgagatctcggtttgttctgatcactctcgccttctccaggtcagttctatcttacccaatgtacatacccatgcttcgtgctctctttatgaaaatactctgttttcctcaacgcaagccgagcggaagtgagatcagatcgcatatatcagacacttacgtaatatatagtcactctaaacaattgtatatgaaatacttagacaaattcaaatttggtcatcgcagtaggtcatactcattctctccaactctctggcttcatcacattaagcccaatcagcgactatcaagagattatatcctctcctctccttcccatcgacatcatctaccagtatggatgaagagaaacgaaccgggaaagttcacttcttctgggatccgttgaagaccacccgcttcgtcgtcgccgctagaggcctcgtcaagctctacgactggcaatcatacgttcgtcctgatgagctgtatctagagcacttttcagagaacctgtagtttgctgatcatgatgcgctgtgtctaccccacttggactacagaaacgatctcctatcgaactcaactctcaaagcgagttgggatcgataacagtgagtcttccccaagattgatatctcaagtccatccgttccatgatctgaacacgactctcttattcagtccttagcttggtctccaaattcggtcgacccatttctagcagcagccacttcttccggatcagtcactctcctttcgtttcctccgattttctcttcctcggatctgaagccaacaccttccatggcctacctacaaccacctcgtcaatctcgaacgtgtacatccctcgctttctctacgcctcacccaggacaatctcacctcctcgctcaagggttcacgaaagctcgctcagatccttgtgtgctcatctgggatgtcacccaactagaacgatcccacctggcatccgctagagaagggtacgatgtggatgatctcaggcgtggatccgcgcaagagggaacgttcatccctctggactttccttcgttgtcttcgtctggaatgtatggtctagacaccgggctagaaaagatcaaaccttgtgtctctctcgttccctcagagacgattttggacctggcatggatgggaccgaacctgttggcagtgtccactcagcgtcaacatatccgactgtttgacatccgatctccttcatcgataggtgctaatccacaaccggttattcaatttggtggttctcaaggagccttcatcggtggttctcccagtatgagcagaaacgggcttgcgcctgccaatgccggcagaatgattgctaccggtctgtcggccgatccgttctctgaagaccgattagctgcgtatgacgaaggtccaccatccaacttgtccctcgccgggagcggagcttctttgcgggatggtatcaagtcaacccttacagccttcgggaccaccggtggacctgtgagagtgtgggacaagagagcaccaaagaacgaagtcatcaagctagatggacccggagggatgctcagaggcggggctctcggcgtcatgtgggacttggagaagccgggaaggttgattgtcaccgaaaaaggcggaggattggctatctttggtctcgtgtctcccaaacgacgcgacgaaacaagtgaactggcgcccgatgagcctgtcgagagtctcacagagttagtagtggaaggagaagctatgaagatacctccaatcaccaacgcatctacggtcactctggcctatcctgggctgacagttgcccacgaaaagcctcagagtcaaatcgctgttttcacgccctcacgtgggggagagatcatttggcccgtcatccctgagcgaagtccactacttttctccgaatcttcaactctcagtttcggaccaaagttgaccatcgttcagcctcctcctcatgtgtcaatcggaaaacacgctgcctcggctcgtcacaaccgtcgtatatcacattcttccgagtcggggatatccgaaaattctaccactccctactcgaataccgtcactctgcctgatcgatcgggattcaatcagatacatacttcagataatgagacatcggtgggctcggtcatcgaagaaaaagtaaagagtttcgatgtagacgaacgaggggctgctgttcatagactgttaatcagtgatccagcttatgttatgaaggccagagcagagaacggatatgggcttgatgacgtgagtcccttctattctcgaggttgatccacacacatgaccaagcttactcattcttgagatccttttgccatcaatgtattccagcttgatcgaaacgccactgttgcagagtcgatgaatcaagaaagcctggttgggttctggcgatgtttcaagatctggactcgcttcagttcagacgccaagataggcaattttgattttgcttttcaaggaactcaacagcttatcgaaggtttccccgaaacggttcccaatctcaacatcccctctaacctattcgaatcctctagtgcaatgtcttctcctcgactccgagctctcgcgcccactaagcgacgaggactgtctccctctccatcaaggacgcctatgcctagatcgcctcagtcgtacacaccaccaaaggcgttagagtatcagtacgcgatgaaacttttgaacgctcaacagagaaccgcagggttagcaggcgatgttgtgttgggtgtagctggccaaacgaagctcgagcaggagaggataggagcgctctctgcgttgggatgggcaatgtcagccgaccagcttgagcaacatgttcgacagtacgttccattccgtcatatggcttcggtccaatatcagaggaaaaaatcgaggtcgaaacgttgagcgcggctatttcctttcaattctaaaatatcctccaatgcagtcttatggatgaagaagaatatgagagagcagcgttctgtgctttgttcaccggttccgttcatcgaagtatagaagcccttcaagcatcttctagtacgtatctctatctgcttcgatcgaaatatcgcttatttaggttcttgtgcatttggctgaaactacatctcccgacagaccaagtatatttgacgatcgcattgactctccaagcgctgataagcgacgacaaacctcagccagccaagcacgctgcttcgttacggacgttccgtctgatcaacaaagttgattccccttatcttcgagctgtatggagattcggactgacgaatgactgggaggaagtgttcaacgaggatggagtaccacttgaggacacgctcgggcttgctttgatgtgggtgtcggatgggttgttgaagcagtatatccgagcaaaggcagctagctcgacggcttcgggtgacttgatagggcttctcttcaccggtcttcggaccaatcaaggactcactcttctccagcgatacgtcaatcgaacatccgatgtccaaacagcagctatcatcagcgctcatgtaccgaactttagtttcaaacgacaaaatccatctgttcgatggaaggacgcgtacgaacggtatcttctgcagtggaatttacttggacaccgggtggcatttaagataaagagtgcgaaacttgcaagggacagaggaggggttctgaatgtgcctccttctgtgtatatccgctgtaatttctgtaataagaatatcacagaggtcgagcaaccgaattcagcaggcggaggtggcccacgaccgaatttggtatgtatccccaaatcacaatctagcccatttggatacctccttccaaaaaatactgacagaagctggtttcattaatcttggtacgttgggggttgcttgggtaaatccaaaggcaagactatgcccgtcgtgccaaaatgtgctgccaaaatgttcaatctgtttcctgactattcaaacatcaaatgttcaaagggaaaaccacatcttggatccattcagagatttgcgtaagtgttcctctcaccatatcttctctctttgagcggttcatcccattaaatctgttgtgtattcacatctctttgtatagactcattcgagacggatggagctggtatgtgtcctttcgatttctgattgtccatttgatctacttttactaatctggtttatcttgatcgatcggataacttcagcttactgtcagagatgtcgacatggaggttcgtggtctttttacatgaatatttgtctaacccgatgaggaagagatgtcctgacaactgacatccgtcttgatcacccttttacgtatatacatatatcacaggtcatcaagcgcatatctttcagtggttcttcggtgcccgccatgacatcagctatccccgatctagacaggcctccgccgtgcgttcatctcgttcgagaagcgcttccagagatatcggtcgagatgatgttcgaggcagactcactcaaaacggtgaggtttatgacggcgagaaagacggagcagaaggtgatgatgaggaaggagaattcttggagcaaggcaattcagtttgtccggtcgttgggtgtgattgtagatgtatggattgatggtcgaaccctctcctctacatccatattcatggtttagaaaagttcatctctcctagaaacgagttccaaatctaagcttctggcagaaagacggaggaggacatggaaagaatgaaatggagatctcacaagaccatcagaagagcgcaagaaaacgcggtcacccgttcagagtctacaggtctcctctcgaaacgaatcaatgacaggctgaacgtcagctaatgtccagctggatatgtctgtcatcctgatggcggctttgatagatggctcatcagctacatcacatagcggggtcacacccatcctattgacatgaaaagaattgaaatgagacaaatgagaagaagaacaacgtcatcacccgaggagatggatcaagctcaaaagtggaggaagacgaagaacccaccaagtgcaaactccatacatagcctgttttggtgtcattacttttgctttagctagcgagagtattggatccgatcgagaaaaaaccgcatctaaatccatcgacgtctcccagatggtcttgagcgcgctcccttgaaagttacttgaaccgaaaggagattggatgatatcaatctgtgctccatgagagagtagccagtctattctatgtttcgaatagatggtcctgatgccgatctttgataagatctttcctattcgtattcaaaaatcgggcggatgatgagaactatacatcagtacatatcaattctgatgaacgactaaaccattggcatatacagaccctcttgaacaagttgttttagaactaaaagcgcgctcaatgtttcttcaggagttttcagctcttgagcaagtagataagagtctggaggtcctcctagatgctgagtgcttttttcgagagaatatcgtatacgttgttcgattgtttgctcagccaaagctggatcttctgcctcaaggtcaaatctatctcgagtgatcccaagataaaagaaggaaaaagaagaggctgtatgagttctataggttaaagagactgtccgtaaagatcgagaatactcaaaactcgctttgtttgcacgaaaaggtcatctctccaataattccagtcccgcttcaagaaatccaaagcttcgcccacaagatcctccctagagatagacacggatggtgagagcacgtatcagattctgtgttatgtagagctatcatagtgagtaccaacagagctcgaaccgatagtattctgattgggccgacacgtcgatccctgcgaacccggccaggatggccttcacgatcaagactgtggtcttttggcctttgctgatggatgcccgccatatgtaaaaaaaaagaaaaagaaaaaaggactgggttcagatcaagttcggataaagtgcaattaactgagacacaagacacgtactgagcagtatcaaacaggatacctggagcattgaaagacgataaagacatcagatgtacgagagatgatggaggaaccggacgaaactctccagcggctttcggcccggatatatccttgccgcatcgatcacgtgccgtatgtgttgcatagctttatacggccatacttttttaatcctacaccgaacgatcagcttggtatcattacgttcgtctacctatcaacttgaactcgtccggaaggaaagatcgtatatagagtcgtgttggacccatcgatatatcagctgtaacaaggtgagtctgttttgttggacaggcttgtcaactagtgacatttggattgagtgggcttctttcttaattctgtaaattctctgatcgtctttctccagagctctccttacccttccccgatcttcatcgaccatgaccttctactctcgcgtcctttgcatcacggcccggatgccccgacccatgccttctctactctttggtcctcttcgacagacagctcatctcaagttctcctccaaagcaacttcatctgcctctgagattccctcaaaagagcccggtgaaaccaacgaaaacgttcatcattctgccccgatacctggatgggaagacctgaaatcagctcctattcttactggacatgacatcagcaaagtccagttaaaaccctctgggagccattacgaacagctcgagaagaagagaacatccaagaataagcttcggcgacaacaaaggcgattaaaagctgtacagctggaggagcaacagctctccgccctaccttcggcgatttcgacaatcccttttgtccaaagcgacgtcgcttctagccaagagaaagaaccgaagaccgcagaagattggtctttcttgagcggtggggacaccaggccgataaaggatacggctaaggaaccaaaagatcaaccgactgactcggaggcattatcaaaagagccttggagggctcaaaaggcgcaaatgaacaaggtcaaaaaatcctcgggcatctcgacctggagtcctgtgaatcggatcactcacgaagagcaacacagactgaaaaagcttcgagcggacgacccagacaaatggaacatccaagccttatcgaaagagttcaagatcagcccagaggcgatcatccgaataatcaagtctcggtatcgatctaccgacctgagaccctccagattggccaaggcactacaggaggaagaaaccatcgacgccgatgaatgggctaggcttagcgaagaagagaaagaaattcttcagatgatcgaacagtccgatgagtctagccttgccagaaaaggcgatgaagagcctctggacgagaacgacccgttcggtgatcttgaaacagtcgattttgacacggtcgaggatgaaccgaagactattgaacgcaaatgggaggaacgatacgaaaaaattgctgatttccgtcaacgaaacaaagagtttgaggaggagcgtgcaaagatcaggagtgatctttggggatggcagcctctcaaagcaaacaggaagagaagcccgagaagagttcaggttgagaagcctgttgaggtagaggccgaggcggcagaaccggaggactcggtcgaagaaaactcagatcctacttctgccaagtcgacgtttaactgggttcttgcgctgcaaaacaagaagaagacaccctgagaagagggttgtacatgttgttcttgcggatatatgttatgttcttctatttacagtcaaagttactcagagcgcgtcaaatatttgttctccctcttcaactataagatacttgtcactctttagtttcaaaactttcaagagcgacagtctagaactacaaagcaagagaaagaacggccggagcttaaggagtcatgagtactctccgtgcttggtgattctcgagtgttttattctgtatggatttattgtcggtaatattttctcacgcgttttctttttacctgctcattttcagtcgtgtccaaaccaacttcaggagtactcttctctgtctttcaccatcatcaccacagccatgtcagacgaaacggcgctctcggatcagattcaggcagtctctcttcaggtaggtctcctctgatcccttgttttttttttgtttttcaattcatctagttttcttgctcacgccttctgaaccgtactggtctaaccggagcagaaagagaagacgcctcttcaagctttcatgtaagaacatcaagaactctacccagagatgttcagtccttgagagaaatgttggtttatgctgaaccctctttttatgtatctgttatccagctcttttccctcgccatacacccaaacgttgatcctgacctcgctagcgtcaaacctgacccacctcaacattcttccttccctaccgacgaccccggcatatcctcttctctgttgggcggactacgacgttcttccccacgagctcatccagtcaacatcggcctcggctgaacctctgctcctctcttcatcatacatctaccgaaagtctctcatcaggaagcattacctccattcatccatccaggagtacttggggaagtatgatcattgggtctcattgggtaaggtcaagggtgacactccgttgagagcagcaacgcctagagggtggaggatggaattgcaatttgcggacgaactggacgagctatttgcggatgacctgtacgacctactagagttgatggaccagggcgagaatagacaagcaagcggggagggagagagaaactggttcattctgaaacctggaatgagtgatagaggaatggggatcaggatattcagtacgcgagccgagttagaagaaatcttcgaagagatggaggatgacagcgatgatgaggatgaagacgaaggcgaggacggggacgaggacaacgaagaaaatgaaggagggaaagtagcgacgagccagcttcgtcatttcgtcatccaggaataccttcccaaccctgtccttctcacccctctcccagctgctacgaccgatctacctctcgcgcctgcaaaccgaaagtttcacctccggacgtacgtcctcctcagctcggcctacaccgtacacctctcccgaactacgctcgccttattctcctctctaccgtactctcctccggaaacgactgaggaatccttgttgcctcacctaacgaacacgtgcctacagcctcctcagagcccaggcgaagtcaatgaggaaaacgttcatttatggtgggagttggaaggcagacagtttgatgaaggaaagtcagttttgacgaaagagttgttggattttacttgggagagatgtggagaagttgctggtgaagctatcagagctgcagtagaatgcgggagcgtacacatgcaattgttgcccaactgtttcgaggtgagtcttcctgtcctcttgtattctctcgcacacctaattcgatcggttggttgtgcctcatatcctgaataatctctctttttgttctttcaaagatctttggtgtcgacttccttctcactctaccgtcaagttcatctcctagcacggaccttcctcaagttcacatcctcgaattcaatgcatcacctgactttcatcagtctggtgagcgactgcaatccaaaatcagagagatgttcgacggtgtcgtcgacggcttcgtcaagcctttcttcggcatcgacgatgatagcgatgacgaagaaaatgaggacaaggagagcagtgccgaaattaaatgggacgggcagtgggaacaagggatggaacgcgccggctggaaatgtttcaccaagggagagatccggagaggatggtgaaaacgatgaatgcttttcaactgaaacatagaaactccggtgattcgtgtcctttacagacgaacatgagattgagaacaatcctatatgtttctctttcgttttaaaaaaaactaacatgctcccttcctatcctctgacctcttacgatcggaccaacccactcaaaaactcgtcccaaactttcctagcaaatatcttatccaggtccccggtctcatcttgcgccatttgaagactgtcgaaactgtgttcgagatgtttgcccttggtcgtatcgaagggcgattcttcatctgtgacgatccaaagtttgtgcgctaacgatgactcgccaggcgcggactgagggcgttgacgctgatgatgctgaaccagagaatcgtataccgcagtggattgggtatagtggttgtaagaatccgactagtttgatcagcagccaaaaagaatagagttgggctcaggcttgtgtctctagaccagaccatagaaagatgatgacaggacgaacttcagagtgaatcaagaacgtcggaggaaagtcttcgtctgggcctaactgattgatcagccaaggcacgctccatcgttctctaatttcttggacattcgttgtgccatacactttggggtacagaagacctgtaacccattcatgatcttcgatgtcagtgcgcggggttgaagagagagaagaagggaacgaaagaaagtgggtataccttcttgcgcgagatagaacatagcagctcctctatttttgtaagctgcacaagcatagcgaagcgatgtcagccattaggcgtagataaatctcacgcatacatatcaaatcgatggacaaacatacaacaagtctctagatcaatgtcatcttcctgagaggcactgacgaccgggccatgttcatcgagcgattcttcaacctcgtcaagctcgatcaactgtgttctacctcttgggggatttggaaacgtttttgcgtccactccctcgactgtcttaaggaggaacgagcagaatcaaaggggaagcattagtatctctgcacattacatcagatagtaaggataggtttttaccggatcggcaagcgcatagagcgagatgatggccaaaggtttgggctccaagtatgagcctgcgagtaaagcgagatgaccaccagcggaaccgccggcgacgatgagtttggaggtatagacggcgatgtgggggatcaaggatggcagtgtatctctagcccatcgacaggcgtccgcgatatcctatttcaccacgcgatttcacgagaaaggcatcaagtatgagtccgaactgggaaagaacatgttgagcggaatttgaagaacacggataaacagacctgatatatgccatcaatctttgtttgtggtgctaaacgatggtcaagattaacgaccacgtagcctcgttttgtaccggactgccaccaatggggtcctgcagtgatcgaatagcagtttgttcaacaacggagctgaagcaggaaggtgaatcatcagaagacgaaccggcggttgaacgtgagaagcacatgaaccctgacattctatccaacaacaagtcgaatgcatttgaaatgtatgatggcatcagcccatgtggtctgacgtaaaacatagaggaagagaatgagagcaaagactagagaaacacaccggatgaagagcaagatgggagcaccatttgggaacagtgtagcctggtcttcagatggcacgtagacgtcgcagccgatggaatgtccagagggatccaccttgtagatgaacgtgctgggaggtgggatagccatgtggtcaaagcagatggttctatgtgtgttggatgacggtgattgaatgtgttctatctgttctatctgttcaccatgtgctttgtcttcctcttttcctccgaaacagaagagaatgagaatcattcgaaaccgattctcatctcattccatcaccctcaaccctttcctaattatcaatcacaaagcatcaccatcacttgcattcatcattgagctacatgtccaaggctgagaccgtcgtcaatccttaccttgctgatccagccccgccagtagtgagtatcatcgtctccacccatcgggctcgtccgatgtgccgtctctttcctctttcttttcttcaccatctcgtcccgctgactatctcactcgcttctcttcgcaaactcattcagtgcgggttggaaatcacctcggcgttcaacaatttgaccaaaaaagaacagctgtactcccattggcagtctaaagcaggatgggaaggagctaggatcatcatggtgagaaattcactcctagtattctttcttcaacgcacgatcatggggagttgactgtttgtcgctgcactgttctctctctaggctcaaatgtcgcatgatgtgaaagacatcatcgatcttctcctctatatactttccaaacctaacccgaaggctggtcggcagggcgagccagacaacatcttggtcgatcttccaaatgtcttcaaacaggccggcttcaacgaggaggaacagcagcagttcctttcgtatgcctcccaggtacgaccttccttcctttcctctcctttccttcctttttcatcttgttcgtctacgtatcagtttcgttgaccgggttatccttgatcgatcttgaccgtgtcattcataggtatttggaaacttgggcaacttcaagtcatttggtcacactcagttcatccctcggcttacacaggaaaaggtatcacccagtcgatcagtctccaagcgatgtataagatatgctgactttatatctccctctttctgctttcatcagtttgctcggatcgttgccacagctatccatcacaaagcttcgcctctctgggagaaggtgtgttcggcgtattctgctctcttctactacctcagtgcgctcactatgctcactctaaactactcatagataaaagttgcgatctactcgatcaagcgcaagtctcagttaacaatcggaaaaccctcatctggccacacgtccggctattaccttcctcggaagacaacctacgacgataccgattcagactaccttcagaccgtgctcgagaagcatgagatcagtcaactcaacactcgggtcgagaagacagaggacggcaaactcatcgtctggatcgcctctgtagaggaagaggaaagagaaattgaggatggcaaggttatcatcaagaaaggagacttcaagcgagaaatggaagccatctcccttgctcttgaacaggttcgacccaaatctttgtgaatcaattgcgatcaacgtctaaacttttttatttatttttcaaaggcgaagaaatatgcggcgaacgacgcccagaaaggctttattgacgactatgtcaaatctttccgtacgggattgattgaagaccatgtgaaaggaagcgagaaatgggttaaggacattggacccgtcgtacgtctaactctttttgtttcctatcaagcatcatatgcgctttaactaatggatgagttcaaaaaaggttgagacctatataggcttcgtcgaaacttgtgcgtcatagtcttccgctctacatctgagcaacagacaacttccattctgacgcctttctcacgaatatgatcacgatcagatgtggacccatatggcggccgagctgaatgggaagccttcactgccatcgtcgacaaagaactttctgctaaatacgccaccctggtcgactcagccccagagctgatcaaggctctcccctggggaacagaatacgaaggtgtgttctttgttggctcttactcgattcggttgtccagtctgaaaccggttctaatttatgccctgtatagtcgacaactttatcaagccagattttacgtccctccagattgtttcttttgctacaggtggaattcctgctggttagtaaaaactatttcgttcgccaagaatgataagacgaaagacgtcgctgactgtgtatgaatttgttttgtgggcaggaatcaacatcccaaactacttttcagtcagagacaaggtcggattcaagaatgtttcgcttggtaacatagtaagtgacctttaacatcaagttggctcttcgttttccctcttgttgatattgcgctaacgatcaatcgtttagtcggcggccaaggatccgaacgagaaactaacgttcctgactgaggacgatgtggttctttacaaagaatttgaatcacaagcctgggaactccaggtcggtattttaatcacataagtttacctcttctgctggctcgtccttcaccccctcccaaagaagacacatcctgactcttgaattgcgatgcccgttgattgtttctgatcacaggttgctcttcacgaactccttggtcacggttccggcaagctcttccaggagtccccggacgggactgtgaacttcgaccgggctacgatcaacccgcttacgggcaagccggtcgagagctggtacaagcctggacagacaccggatagtgtgcttgggacatgtagcagttcttatgaggaatgccgagctgaggcggtcgcactgtacttggcgacaaacgaggatatcttgaagctgttcaaagtaagtcactttcctttgcccttgagccatttgtagcgatccgatgcttacaatgtgtgggcgatttgtagtacaccgacaagaaatctcaagaaggtgtgctgttcacgatgtacctcatgatggtccgagcgggtctccgagcgctcgagttcttcaatccagagttgaagaagcacggccaggctcatatgcaggtttgtctcgactttttctatctcagagagcgcgtgagcccgtcgatgttaatgagtatgtgctgttttgcggtttcctcaaggcccgaattggtatcaccaacgtcttgatccaggatgggattgtctcacttattgagactcgaaatgaggacggaaagctgacggacgccaccatcaaagtatgctctcttttgtcattcattgttttattatcttaattcgcctttagggagagctggatgatcctgaactttagtctcgttttctctgcaacgtatattgtagctaaatagggagaaggtgttgaaggaaggatcgaactcgatgggtaggttgttggttgagctgcaggtcaggaaatgtacagccgacggtaaaggtgcccggtccttctatggttcgtctcgtccttccctttgtcgctcttctttcattcaaagaagaggaaaggaaaatctgtcaaacatgtagagggcgctaaaccggtattgcgacgtttgaacgggatagaacaattgacgacaccaatcgagaattgggatggagaacttcgcgatctagtgatctccaagaaagcagtgagtctccatttttctcctttccttttcgagtccttctcgatccgttccactttgtctaacacaggtatatattcttgttctctactttcaaaaagccacgaaagctgttctgtcagccaaacacgtttatcgtcgatggagaagtcatcttgaaggaatacccgttgacgctcgagggtctcatcgagtccactatcgagcgagggatctaagaaagggggatgggtcgagtgagactgttttgtgtttccgtattctctggtcttgtgtcctttgtctcctcctttctttccactcggattcttgtatacgacaaagatatgggcacgatgaataatgattgtgttatgatacatgctagggcatacccgtttgcaggtcttggctcgcgaagtaaaagaatgaaagaaaaatcaattgaaacaagaagagagagacagagagagatcaatcatgcagatcaagcgcgagtcgaacggccattccgcccaggacccagatacctagcccgatggtcagtcctgccagacttgattttatctttttcttgagtttccttctccttcttcctttgtgtgagataacactgctcctgctgttgctcggtgttcttgtgctactgttatcagccctctgagttcccctcgacaagagcttgtagtcatcgtcctgttcttcttcatcttcttcttcgacttccgctccatcatcctcatcgcctgaaatatcttgttcatattgttctgcattgtgagccggggtgatgggctcacttgcctcgcgctcaccaccaggtaagccccagtcaagtaacgcgtccaagaagaatccgccatccaacagacttagaggcaagagattgaagatcgagagcgtggtcgagatgacggtaaagtatttaaagaggagggcgattgatcggatttgagggtagagtgatagggggattagagaagggggaatggtaggtgatgtctcgactgaggaagagaggatggatacagaagaatacaaagaaagcacaaaagtaaaggttatcggacgacatccggtcaggagcaggagcgtaagacagaagagagaaacgaactctgggaatagattgattcactcggaccctgccaaacgatagattcctcgacgtcagcccaccgtttgtttgttccgctcggggaacgatccgaccgagggctgagaaaggtgatccgaacaatctctcctttggactcatctggctcaatacagatctcccctgaagcgagacatgggcacctctgtggcgtccttccggtagagtctacctgagtggagggaagcatgattgagggaggtagacatcgacctgatgaggacgtggaggcggaagggttgaagcatatcgtcaaatcagaggatggggtactcgctggtttgcaacacaagtcgttttgcgctgagcgtgatatcctccagaacgctcgtcagcaaacaaaaaataaactaaggtgaatgagaagaagagaaaagacgctcaccaagaaaccaagcttcagacacacaccagccggacgtaagaccgggaatgtctgtatgtctgtcgacaaacatgtctgaccagagcttgtcggattttcccagactggtcgccccgagcggactgtcgtcgagatgggtgatgattgagcccaccgggatagcctgtgcgagagctgagccaggttgaaaaccaaggacggctcttccgatatggctgacgggtatcaacgcttgatttgcgagcagggtaagagcaccgaggacgatgacggagagaaagttgtgccagcatccggcagccgctatccgcgctcgttctctgggtggtgtcagagcgagctcgatcgagggcaaagtgactgaggccgagggaaagatgggagagagttgaactgtcatcagcagagggttgattgacgatctagggcaggacgatgacgggcaggatgacgagcaaggagacaggaaacaaggcgataaacagatcaacagaggaagcgaaaatgtagaatcaaggcagagggaggaagaaagctaacaaggcggcagagatagcatgaccaggttcatggactagttgggcgagtaggaaggatagtataaggtataatgcctgagagaagggaatggtaattcctgggatctggaagaagggcaagaggaaagaaaggaaagaaaggaaagagagcaagacagaggacaaaggatcagaacagagacgacaaggacgaaagaaatatacagagacactcactaaaggttttataaagccagagtcggctgttgtctcgaccggggtcgctcttttgacgagcgaggcaatcccggaggtggtagtagtggtggtcatggcgacggtactgccagtgggactgccggtggccgatacaaatgcccagagggatgtaccaacagtccaagcttgccccacgagcagactcagggaaagaacgagaccgatgacggcccaaatgatgcctaggtcatagaacagacctgcacgagaacgagtattgggtcgaaccgattgaaagagcgcggctggcagctgattgaatgcagtggtggatagagcgatgcctatcggatttgagtataaatgccatgagtgagaggagaacgagcgatatttggtgggacgtagcagatggtatccagcccaagctatggagagtacgatgaacgagaccggcaggacgaacgactcttgttgcatcggtgcatattggggaggaagggatggaaaggagagggtaaatgaggattagtgaaggtgagtaacgaagaagattagattgctgtgctaaacacgtgagggatactcggcatcacgtgatcatcaatgccaaaaactgtcagggatgttacctgagttacgctgaattgataagccatgacacgtagacctccacctttacttccactactcctcccgctcctactcccagcgcatagaccaacttccagcgcattatattgccaacgcatcttttcatgatgttcatagggtctgacaaccatatataagccaagcttctcgaccacttgtagatagaaaccctagtcttggatcctttgttcattctactcctctccttgtccttgtccttgtccttgtccttgtccttgtccttgtccttgtccttgtccttgtccttgtccttgtccttgtccttgtccttgtccttgtccttatccttgtccttgtccttgtccttgtccttcgtgattctatctatcctatttcccagtcctgagagcctgaatttctcccttgaaatctaagagtcttgtgtggttacaacttccgtagcctcatcgttaccctccaaacctgaactataacactaatcatgatcttatcgggcaactaactacgagaatcttggatcatcgctcttccatcttaatcgccagattcgcatttatatacaggagctattcaacacggtgtatcattatatgctgaatttgaaaaatctttgaaacaagagggaagtccattgaatggcgtcgccgagaccacgaacctgtcgtcgtcgtcttcttctgatgagtttgccagcctcagtcgagctatgtcaacgtacagatttatttgagtgttcagcttggcaaacactggaccatcaaccgaatccgaatgacaactgctatcgacgagcacttggccataaaatgagagggagatgtaaatcaagaacttacatggaagtcaatggcaacgtctttccacgttaaatcgctccaaagcaccatttcatgaagtctggcaaagttgatgatgtcttgagcatggaatctttctaagtttgccttagatatgtcggccagggaatccgacttgagatgtggagtgtccaatgacggaagtgctctagaacaaccattaatgcacctcgaaggacctttgcaatgagctgtggaacattcagcctcggtccttactgctctgcaactttcacactcttttgtatgccaacagaaatctgaaccacttctaaagtgaaagagtgcctggcgagctaattcagcgtcccggtagacaacggccagcccgaaaacgttgatatggtccatttctgtgaacacccgaaggtacgtcaagatgaagtctcgtataattggcgtgtcgtacttgtccgccatgtctatgatcctgatcgtcgcagttcatgcccacatagatgaaaaggccagctgaggtaagtgcgacgaaggagatggaggcaaagacgacgaggtggcagagtggccaacctgttgcagtcttctatggctaaatatctcgctcgtcgcatcgaggggacgataaagctcaggaagagcttcaagtcggatcccatatcgctcagtttgacaacaggcttccctcctatcagattgccagacaaggcaagttggagcatgtcgacaaagacggctgagttcgcttgtagctgtaccttgcggacgacgagggcgagtccatctgagctttcaaggatgatgtctccctcaggatctagcaggactaagtcctcgttagagttgggagtgttgtcggacatgatggatcttgaaagctattgtctaaaagaaatgagaagggaatgtcgacaaggtaggaaagaaattgacaatagatgaagacttgtaagctcttaaatgagccggaagaccatactattgttcaacgttttgtgtgatcagttcattacggcgcttgacgcacacgcaaagcccaaagtcgttttgtttgtcctccctttcatgataatttttctactttgctcgaaagtctcgtcgcgttttgtgaatgtcgtttctaagtctaaatatgatgcgcaacatagatagagtacagtccagcccttcgaacaaacggattaagtcatggctgtgacaaagggagaatcaagtcatacaaaaattgatacaaaatgcacacatgagccgaagtacctctcttgagcatacattggtccagttgatatatgatacgtactgtacttgggccctccacctccttccggtacagtccaggtaatatcttgtgtgggagtctaaaaattcacaaaaaagagaggcggcagtactcaatgattagtctgacgatacacacagatggggaagagtgtttgtcaagccgagtgtaccttgatggagcaagtcttgcaatgaactgaaacatagatagacacctcaacatcagcgttgtacttggtcaaagtttgagatccaacaaatataggcggacgtactgcagttttgtgagttgatgataaatttcttgccttctgcagcgtcagcatctccaggctcggcatccacatactcatacacagccgctgggcaagctcgtcccaagagtccagcgtaatctaagaaagcatccgaatcacttgctcagctattcaattctgaccaaaatgttgctccagacaatagaggcaaattcacctcgaacgttggtttcggtatgccgaactttcgctccttcttcgttaggcagctgaagatgcaccggctggttttcggcgtgattcgtagccgttaaactgacagatgtcaggatgtcgaacgagagctttccatccggtgccgggtagtcgatcggcttgcattcactacgatcgggtcagcccagtgagagtaagagcatcagcaaccgacaaaccagagaagcgattctgattgaatgaattgtacctggctttgttggtggcgacgtgatcctcaacattgttgtgtaacgtaaatcctccccttcctttgagaataaaagtgtccaatccagaaaagatcatgcctcctaggttaccgagggggttgtggaaactcggtcggacgttcctaacctcccaaagctctttatagatccaagagttcttcaaagcggtctcgtacgactccaggtttacaggaatagactcatcggcagattccgaagtagaagtaagctgttcgtaagctgcttcggccgcgagcattccagacttcatagcattatgagttcctttgattttcgggacctgatgtagcaaaattcgaccaaggaaagaacagatcagcgtgagttgagtcattacctaacttgtgttatttgtaaggtaatcttacattcacaaaacctataagagtagagaagtagatacaaagacagcaaatcattaccacatgatcgttacacaaaataagacggcagaagaaatcactcaccagctgagcacccaatgagcgcaccaccagggaaaaacaacttgggtatcgattgaacaccaccttcattgaggactcgcgctattgaaagaagcttgcagtcagacgattgcgcgaaggatcaactttaggcaacatctacaaggacagcagacacacctccataagctagacgctctccaccctccaaaagttttttgtagtatgggtgatgtttcattctctgcaccgatagggcaaaaacgaagaaaagtatccatcaccgatacgtcagttgcgagttcctcgttcatggcaattaccaacaacagaggaaaataaaacgtacctgaaactctttgtacggattcaaatacggatttgtgtagtcaagtccaatgaccaaaccaagactaaccattccaccctcagtatggtactcccatccaccaccatacgtcttccaatctaagggccaccccatagtatgaataacctttccgggctcatacacttcatcccgaactttccaaacctccttcaagccaattccgtatgtctgaggatcgcagtccgctcgaaggttgaactttttcatggcgatcttcgataaacttccatgagcaccctctccgagtaaagtcaccttggaaatgaaattcattccgggctcgtacgactccttcattcgaccggacttgtctagtccaacgtcatttgtgccgactcctcggacagactttccatcctcggagaacagcagtcgagcgcctgcaaaaccggggtaaatctcaacaccgagttcttcggcttgagcggccaaccaggctgtcacctgagaaagggatacaatgtagtttcccttatttgacatctgaggaggatgggggatcgggtatgagctgttgggaaaaaggaagcgcatagcaccattgctggccggttggttgagctgaaaaaggagaacgttatccagttaaagactcggtcgctgtaagagaaatcaataagtcgtaaagggcgcttaccggtgcccctagttctttccaattcggtaaaagctcgtcaagagccttggtctcgatcaccgcacccgaaaggatatgcgaccctattaaacaaagtatttcagagaaaagaaacagaattacgtcaaattgaggcactaaacacacctgcaagaagaaaggaagagagtacacaggagaaaaagaagtatgaaaagaagaaaacataccagcttcagctcctttctcgagcacaacgattcgcttctcctctcctccgtgttcctgctcgagctgtttaagcctaatggcagcgcatagaccagccggaccagcaccaacaatacacacatctacctcttcctcgacccgctcaacatcatgcggtggaaactcagagaaccgaaggagggagcttgaaaaattttgtctacgaatgtggatcgggttacgggagacggctagtgctcgagggcggaaggcagccttggcggcgaaagctgctggcgttgaagctgaaagtattctggaagagagaaagggcatgatgaatgatgctcaccaggatcagataacacttaatccgtgtatgcaccgatccgtgtttgttcttttcagagtttgtgtgaaggtggatagaatgatcgggcaagcgggtgagaaagaaatagaggaagataaagaaaaacgaaacactgaaaatgaccaaaacttgatggaggcgccccggcggttggatcaaaaccggtgttctgattggtcaatcgaccgtcgacctcatgttagccacagcaccaaaaaaagatgactcggatatgatcatttatagaaaggattgaatggacaaatacagctcgacatctacatagctagtctatagaagaaggatttgtttagagcaagatgaggtgaaaagaaaagagaaaaaatgtatatgtctattacgccctggctggaacattcgacgccgaagacccaaggccgatactctcgataactatcaaattgaacacagaagagagacagtcgtgatcaatttctgaattgttttggaccagggaaaaccccgtttaacaccagaacttactattaattgcactatcgaattacaccaaaaagcgaaagggcaacctgtcagcttcttcatgtgccaacctatctatcctgaagacaaagacttacgaagcaacgtcatcttgaaattgagctggccccaagatgttaacaagccctgctttgacaaacaattctttctgtgtaggtcggagatgggtaaagaatatcggcactcctctcgctcgatacgaaatcgcaatctcttcaaagatcgcaagcgctctacaaattgagaagagaacagaccaacgaaagcgtcagtcggaagatcggaggtgaactcaataagttggaggaaaattactcaacgaagcatcgatgtactctacatccgacatgtgaatcacaatcacattcgcctccgtccgccgaggtgcttctgaagggtgggccttactcggcccgtacagttccagtcgtcgaaggcgctctttcagttgtccagtgttggctaggaaattcaaactcaaggttagttgccataagtcctcatccggaatgaaaattttgtggcaaaaagtgactggacgaaccaaagttcaaagattctctgatccgaatgaccagcacaccgggaatgtcctcctcagcctctgggttctcatcaattgccgcccatttgtcgcccgcgcctcggacgtgaccaaggatcttgatccgggtctgggtagagttctgcacgacgaggatcaatgagaatgcaacagatgcgacaagtccaggcttttgtttggagagatggtgaatggaagttagaaaggacgtggataactatcaccagagaaagaaactatgtacctctacgccgacgaaaagagtcagcaggaaagtacctgtgaattgagtgagatcctgccatgctgacaccttgagataaaaccgaatttcatgaggagcctcaattataattccgataatcaccataaacacgaccgccgcctacagacatagataattcgggagagataacggtcagacggacatcgttttgcatgatcaaacaagagttgtcacttacaagcacgcatttggggaggtaaaacaaactaggaagtaggaagctgatagcgacgaagatacagaatgccgaaacaagcccggccatctgcgtccgagctccagtctctccattaagtcgggatcgagtgacggacccttttgaaagcaacaaacccacgcacgtgttagtcattgttgtgtcgttgatgagcctgacttaaacaccaatgaatatgatcaaagttggacgtaccaaaagcaggaactaatccagggaagaaggacgaagcgatattggaagcacctgaacacggacaacaaacactcgtatcagtgtttgcgagagacaacttggagagcaaaatctatgacaggggaaaatcatctcacccaaggcaaccaactctctgttgggagagatagaataaccaaacttgccagactgttctttggcagagacaatgctatctacgaagccgatcacactaatgacagcagatgtgctgaactagaggtacaatgaaatggccaccaaaaagtgtgtgcagtttaggctaggctatttggcatcgaatatcgactagtcaccacatttttgaagaaacagacgtaccgttcggatgaagaatttcagtgtatctctattaacagggaaagcaaccgatcctcctccgacaacggctaaactttcaatcttgcccaacacctggagcccattgagatcccaccggtacattctggcgagtactattgaccgagttacaaatgttgtgcagaactgattaagctgcacccctaaaacgccccaaattgttgcatgaataaaaaaaaataaaaaagaaggccaagagcttacgggtagtgatgacaactcctacaaaaatttctgggacaaacttgagccacctaaatcctcgtcgattcttcatcaacttcttggtcgctttggtaacaaagaggaaagcgaatgtgctgaaagaaatctatttcatagcgtttgcaccacggtggacgatggaacgaggcgttcaggacaggccgagttctaagctcactacgaagcaaagtctgactacgaaactcacaattgcggtcaaacagtgggtttccgaaacatgggtggccaaaaatgcaactttcgacacggtagtgtgaggaagaggcaaagccgcaatcttttgtgacagtcccagcatacctcccagttgctcgatactaatgattacggcaacagcagtaactgttgagacaaataacgaacgtgcgcagatatcaggatatgtatccaactagaaaagaagacgcttcagaacatgacttactgaatccctttagcagggctctggataagactacgtctaggaaccctaatcggaaaatcccgaggccaaatgtgatcaagccaacctgaacgacgatgatacgttaagaagaattatttgtttaagttaacaacaatgaaacgaatcttccaggaggcacgtacctgccatccgatagctgttgcgacatcaacaccaattgcttgtttcgctgcatcggaaagcggattgtgaacgtcacggtccatgtgaccctagaagacatcatgttgataaacaagaggtgtcagcgacgaaaacagcaatttaagacgcagaaacgggccttacgatgatctcctgaatggtatttccgatcaacaagcaaagcgccgcttctggtccgatagatagttgtctgcatgtgcccagaagggcataaataatcgctggcacagccgagcaatagagtccagagattggagagagctttgccaactgggatgcataagagatgccttgtggaattagtagacacgttagggtaatgcctgccacaacatctccagtaaaccttgagataaagtataaaaatgaaaggaacaaatttcagccacggcaatgagacccatgtggccgagcatggcggcaaaaatgcttacagctcgaggttatacgtcggcagccatgataagactggaatgctacattaataagggctcaagctatgagcgttccgactcgtcagattcaggctaggaggaggaatcagaaactggcttactagtactttgatcttgttctgaacgtcatgagacgtctactcttcgagccctcctgtagatcttcttcaaggtcaccggaacctttcgtttggatcccttggaaaaaaggtgtatcctccgccaacatgcctggtgtgaggacctgctgactgaaagattcgtcatcatcaaggccagagattctagatagaccgctcatgctctgttgctttctgggtggaacatatggttgctgacgtgctgaagataaggtcgaggataacaaaggagtggtagaattcggagcggccgttgtaggtgtgagatctgtatcagtggggaaagccggtgtcggagctcgggaagtataagttgattggtagcccatcgagctgctcgagaagctcgacatgattcagctttcgcctgtacagatctgaacgaggggtttgtgaaagatgggaaggtcgagagagaaagggagaagaacaagataggaagaaagaacaagagagttgaagcacaacaaagccaatgggaccttgagtatttccagagttctcgctcatccccgacatttcatggtaacaggttacatcgtcataaattgaaagttcttcgagtacacaagaagcatatagcatagaggaaatctcgagtagcagtgatagtacatcaggacacgatttgccgtcgtcataaactctttcttatcacatgaaccaagctctgcagttcagaattggtgagataaccataaagaaaggaaaacatggtgcttagttaatcaccaagttaccgtcacttccaactagaaacgaagaacgagacgatcaactcacgaattttggaatcctacagtctcattgatcctgtcttgcacctaaagtaagaagacaggcgagtcgagaaagatatataaaggaagattaatcatttaatcattcaagatgaccatacacggaaggcatctgacgtacatccataggcttgaagccctgtatagttggctctcggccttgggagcggtagacctgtgccacagaagaggatgggaagagtaaatgtgtgccgtttatggaagaagtagatatataagctatgggactataccagaggcctagcagcggccgccaaaatatcggcgtagtagcatggagtcacaagacccacgcttaattaaaacccacagatgtcagtgactccatcaagcataaccgccaaaagaaaaaaattgatttacgatcgagtggcccgtccataggtatagcacaaattgtaagtgagcctttggaactctaatccaaccggccatccgaaaacgaatagatcagatcgccacaatttgccggttactatggataatccttcatactgatagaataagattggtgaacagaaagacataccatcggctgtaaacttgttttcgtcgaccaagacgatataatgggttggctacgtagtcaagcgagacacctgtcttgtcagattcgaatccaaagttagaaacatatttgcttgttgcatacccttgcagttcccttcaatcctgtttgagctgttcatgattttccattgtgcagatacgaaacggaagagaaaccttagatcgagtaagttcataatgtcagggaactgataagctacaaaacacttacactgcagatagaaatcattcaagtagggatgcgtaatccctttatcacaaaccgttccagctggcaggttaccggttctatcaatatgggctctgagttgataacccacaaagtgccattagtttgacaggtctagaagatgagaggacagcatgatacttcaaagaaccaatactgactgctgtccaaagagtcggatattgtgccgtttcgctgcgatacagtatgtctatgagggaaaagatgatgttgtgcacgtcgtcgacacaaatcgtagaggataacaaagaaacagattgctgtagcatacttacaatagttggttgatacctatcgcgtaggaaagcagatgcgcaactcagattggcggtacagaattgatgtctgaaagtaacgaattgaagtcacatactttggattgatagttctacaagcatctcggattgctttgacctcagcaaggacgacctcttcgtatgatccctatgaaggtgaacccggctgaatatgttaggatccaaatattcagataaactgatgtggctcgctgacctcatcgactctacacgcatacagacaaataatgagaaaagcattcagctgcgagcgatcagagagatggacgaaaaggcgcacccatctcggtagaagacgatccttgtcgctggctggtttctgttggctttggcgtactctcgaagcatcttttcggttatgctagccatatcttgaatgatttccctttaaagatgacgcagacaaatatcagtattcttcggagatcatagccttgttcatgatgaagaagattccttactgtcggcctaaggaagataattgaagattcagagatatcagcatacatcatttatgccaaagaaggatgcgaagattggaagagagggtgaaaaacttgcctgcttggagtctgacaaataaaacaaagtaacagatgagcattcactagtttgggctgaaggacagagacccttgtttccatgtttctaccaggggctaaccttatctcagaccggtacttcgcattcgtaccatctgtagtggccacgaccgaagcggtagtaggtacatcgtgtgtatcactcccgcgcaaagttgcaggatgagtgcacttgataagtaaagcacaaaaaggtcaactcagccaacatcattacatcaaaatcaaaatcccatgtaacggagggtctcaagtacttacatccgctccaaaaataatggtactattcgtaacacccggctatgaaaatggaagaggaataaaaaaaatgtcctgtatgtgacatgatatggagctcaagactcgatctctggacttacgagatcgttcggagctacagcgtgggtcactcctgaaagcttcatgttgactttcatggcaacctgttgaatccaaggattgtttacatcggtttactggtcactaaaccgtttgtagtgagatcgtattgctcgacttacattagcacaatactgttgaaggcctcgttcattcgggttggtcaacttattggctattaagcattgagtcaccacaggcatcttcatgctccagctacaaagaatcgatgtcggatcgatccaaatgagcgggaagagagaacatctgagcacgaatccagaagtaggacgaaacctttggtgatgagacatacaaggcagcgcttttgatctgatctttgaggatcgtgtccttcttcggcaagataacgacgaccaactgtggctctcgggtgccctgtttcgttccaaaggtaatgagaatagaaacaacccatggttagacttagtttgcaggaaacgtatgtgaagaaatcagtcatgacttgcgttcacgctagcctggtcataaccccatttcagaccatcagagatggactcggggtttcgtgcatgaaaattcaaagtcagaggcggcctcttttggatgacattgatgccttgagatagacgagggtcccaatagagattatatcactaacacaatccttatgatgaagagaaatattgaagtacgtaccaacatcgctcatgatgttgacgaaaaacatgataaacttttgtaagtcaggaagtcgcatgtaagagtccaagcagacaaccgaccacgcaaacagatcagtccctttttggaagaacgtctgatcaagagcggaagtatatgtatcaagttatacgataagtcacgatgaagatctaaatgtatattaaatagtatatgactaaccttgccgttcaagttccatcctccatgagccggatcaattggtcttgggtttctgccaccatagtgaactgcaagctagcatagtcagctactttgtataggcgtaagatgtttgaggaagtcaaagacacatactcctgggtcctctcaagatacgcgcatcaacctccatcataactttagagacttccagcccccaggctttgaattttggctggctatcgtacgccaaaatctctctccatttgatgatgttgcttctcctagctggcggctcaactgccgtatgtttgatcatctctgccgtctgttcgctgttcagattgatcgggggcctgcacgcatagtgacgcttagtttcgatcacttcggatgtttgtgtgaaggccgcacttacaggcagtgattggcgctgatgatcacaagttccataggaacaaagttctttttgtctaaagtagatcaaaacgggtcgataagcttggctctggtatcatagaatctatacgggctcacatgtcacacatggccatcctgggtgtgaaagactgatattataaatattcttgaagtaatcggcaacttgagaaggtggaatatgttggaagaagtatcagtgtatgtgcttcgacagaagaactcggcgacgaatttggtggcttgcctgaagtcttcttgtcattcttggcgaagaacaactggtttgaacccaagg

SEQ ID NO: 3155 - DNA, 14203 bp, Xanthophyllomyces dendrorhous
tccttgtccttgtccttgtccttgtccttgtccttgtccttgtccttgtccttgtccttgtccttgtccttgtccttgtccttgtccttgtccttgtctccttgtccttgtccttgtccttgtccttgtctccttgtccttgtccttgtccttgtctccttgtcctcatcctagtgatcctatcaatcctgtttcccagtctcaagagcttgaatttccccctgaagcctaagaatattgtgtggttactgctttgtaacctttcgttaccaacccagctcccgtccttaacaaatactgtcaggaatgtgacccgaggttacaccctggaaaccttcccttacttctagttctcctgcctcgttattccttatgctttttcattgcatcaacaggcaggtatatagtctgttagcgcatgtgcttctagcaccttctatgatccgttctcttatgcttaatcgttggagtctgaggacgatatataagacgtggttcctttgccaccgaaagtatagtttctcaagccaaaattctttgtcatttctttgtcatccctttgtcactcctgggttccctagtactcttgttcccagtgttatacaaatcttgttcttccaaatctcttcgccttgtgccctcgtcacagtgactaagccagagagcctgaacttcctccctgttagccacatttccgtctggttacacctccgtaacctctccatcgccctctgaacgcggattctgacaaatactcggttcgtatagacttgtagaccgcgctttcggcatgatgtcatagccaggtgtagataagcactgaggataaagttctataaatagatactgcgtatgactgcgtctgggtacgcgttggtgttatctgccgatctgacagtctgtcggagggacgaacagatggggataggaagcaaactattgggggacacaaacaagacacggtccaaacaaaatagacaaaacaaacaaaaacaaacgcaacagaccacggccgtgacgttgccggtgaggaacaggcagctgtctgaccagcaacctgtttttcaggggtacaaccaaaataaagccgaccggaccgaaagcgcgcgagaaattctgctcgatttttctgcaccttccattccgacatgactcgtctcttcggttttctttggtcttgtcgctgtcttgactgtgggcgccatacggtaaacctgctgagctggttgagccgaccgagccgacggagctaactggactgactgagacgtccaaaatgactattggcctttcctcccgccggcaggtcagcgcgaccacgacagcgacagcgctgaggccggcactgagaccgagatgaccggcgttggccgctgtcgtgcctttcgtccccttttggtcctcactgccctgacttgtattctctagccccggcctccgctctggctcttggtctgtggccgctacgctcgctccgactttttcttgcgctagctgtttatttcccgcttgactcttttactttagaaaattcatttttattctctattttttgctttcctcttcttttctctccgtctcctcttctagacaactcactgacctataccaccactgaccaacacatccacaccatgttagacctcaacggagatcagatcttcccgcccatcacccagaagcaagaaacgcaacagttcgagtccgcgctagagtcctacgccgtaggattttctaacccagacccagagaacccgcaggactggccaaagctcaaaagatggagaggtcggtctgggtttctttgcttcctttgccttgttgttgcctagcacatcgtttacggttcttctacacacgcacgcacattcgctgacagttcggttttattcattgggttctaattgatcaacagtcctttgcgtcgctctgtttgtaacgtacgtacgctcattcgatcctttcccttcatttccttcatccatctaggccccacattttctccctcagccaaaggctcaccgttttaaaccattcatatatcctgttcacagttacacctctgcctgttagtatcatcaatgactctgtcaatctcccaagaattgtcctagagcaacctattcattgtcatggtcttttccgtcgtgaccgcgtcctcacagtcaatgcaacggtcagtttttttctttgctatctcaaagtcttttcgtttccttccaacgcactgcagtacatttactccactacaatacatacactccactacaatatattcactgccatacaatgcactcatgacccaccatgctgacattctttcctctttccctcatttcaggccaacggagccgccagcgccggctttaggaaagagcaccccggtgtcacgaaggccgtgttcacctcgtccagtttcacctatcttgtcatgcttggtatcggtcctctgtatgttcttgcactcgttcggtcgtcgagatccttcaagccgtccatctcctgaccgactcgaggttctctatccttctttttttcctcctcttcctcccgccggctttctatcctcccgctcgcctcttcccctatagtgccctagctccaatttctgagacgttcggccgacgacccatgctcgtcatcctcaccggcgtcatttgcatcctcttcttaccccaggcacttgcccccaacgtcgcctccatcatcgccaccaggttcttccagggtctcgcagcctgtatcgaagggcccgtcgcagccggtgtcgtcgccgatcttttccctaaaaacatccgaggaccagccatggggacattcgtcctcaccgttttcactggtgagtttccaaaaagtcatttgattttgcttcaactttccaagctgatattttcttgtccctctttgccttccagctaactctaccggcccgttgtgcgcggcttggatcgcgcaaaagctgggctggcactgggtgtattggattcaaatgatgtccggtggcctctgctgggctctctgcctgtttttccttccagaaacccgtggagatgtcatcctgaccaaacgggcaaaagccataagcaagcagaccgggaaagaacactttgtctttggactggacgtacacgacagcttcgcccatgctatcaaaatttccctttctagaccgctgctatacttgtttaccgagcccatcgtcaccgcactctccctctgggtcggttttgcgtaggttttctcaacttgctttctctcttttctactcttttcccagcgctcaccgttctctcctctcctttccttttccctctagctggggagcagtcttcctcctggtcggtacaatctccaacgtcttccaggtcacctacggcttctcccaaggtcaggcaggcacagtcttgatctgcggctttattggtgcttccatcggctggtttgaaaactattacatccaggagcgattctgtacgttctctttctcttgcttcgctttacattcttctgtctttccttctctttcttgcctttttcttcatgctcttctcacaccgaacacaaatacttttatccttttttaatcccagatcgaaacgcaatcaagaaaggcaacggtctggctgctccggaggtcagactttactctagcgccgtcggagggattctattcgctgtcggctgtttctgcttgtgagtccttgatctttcaccttggttcattcttctcatcgaccaagactgattgatctctcggcgcgctcgctcgcacgcacaaacacttacagtggctggacggcgagaccgtggattcactggattgtgccctgcatctttatcgtcatcctcaacgccgggatctacactatctatctcgctacgtacaactatctcggagacgtctacaatcggtactcctcctcagcacaggcttcccagtcgctcttaagaaatatcctcggcgccgtctttcccttctttgccttgcccatgtataacaagttgaccttcccttgggcctccaccgtcgtcggctttatcgctctttccttttctgtcgttccctggatcctgatcttcttcggcgctcgactcagagccaggtcaaagattgccgtcgatctagccaacttggagggaacaatcatccctgacgaaccgtctgcgatctctgtcacccaggagaagacccatgtttagttgcacatacctttctctccttctcttctctccctttcctcctgttctatttatccctctcccttttcccccacttgtcatctcttgttatcttttggttgcttcttcgtctcgctcgctatcagagaattagttaccacacctagttgaacctctcgttcatccgagcctaatctttcttttctcaaaaacctagaagtctgaatggcattttgccttcagatctgcacttgcaccagaactagacggcctcctcaaatgtagaaccggaccatccatcttcaggtcggttctggtttcatcgtagatctctcactacatggatccttagaattcctagaactcctagaactttttagactgtcagacgcgatcacctgtgttgacatcattctggtattcttgattactttttttctttttctttttctcctttctcaaaacctaattgaacctcttttctctttctgtcaatctggtttatccagccatctttctttctcgtctttttttctgtcttccttttcctcttccccttcctcatctctccttcctgtcgtgttcgcctgcctgttgctactctattagggtgtatgtctctctgtgtgtgtctgtgtgcgtgcgtgtgtatgtgtatgggagtgaggcgtgtagaagagcattgttagcaagagatgaatgaaacgttgtatttcttgtctttccgactcgtcttctaccatctcttctgttcatcgtcctggtccccactcttcgtttgattactcgccaagcttgacgataagccgaccgccttcgatccctttgtccgcaaaacctctgccagctggtctgttgcctttatcttcgtcctcccctggagcaagacagacgatgaaacctgcttcgctcgaacagtcgaatccttctatactcaattgttccaattccgagtttgacgagtcggctgtacccgtcggaggagtagtagaagaggaggaggtccggaaagcaaacgtatgactcgtcagagggcttccttccatgttttgatttggatcttggttctggtatttgatctgatcgttcagattcggtcgatgcacgaactggacatgttatcaacacatgaatgaagggggtttaccgtttgacaaatcagtacttcaggcttcgaaccttatgaacagtacactcgtgtagaacggaagcaagggaaaagggagatctacacagagaagaagaagtgaaatccatacggaacgcaaacaaattgaaagctcaccatgaaccgttctccgatttgaaggctatcctctcgttcaatcgccatcccgcctcgggccggatccccactgagtatcctgacgaccctgttgacgtgccccatggaaccctgatcttcggtcgtagatacgccctcgcgcccccggggacggatgagaccgagaaagaattctttttctttgctacccagatacgacttgtggtcgaaccctgcggaggacgactcttgaagaagcatgatcaaatgtttcgtcgggttggcgatggtgtcctcagggtccgatgcgcatcggctgatggacaatagaaggttgccttgagaactattcaagagaaatgttcaaacttgttagcacagcgagtgagacatgagtcccggaggaaacacaggaaaagttaagatacgaagagaaattgggtacgaacgaaacgacttcgtatacctgcgcctcgaccggttccatgccctcccatccgatatccatcctcactccctccccctgcttttccttaatgtctccttccgagatgatcgccaggccaactgcgccttggtcgtacgtctggttcatgaaatagagtgtgtacggacggccggtcgtgaatggcgtttggggcagaactagccctgctttgcaagatattgagggaaggagatcgaacgtcgggctcaatgatgtcggtgtggaaaacaaaaatgtcatcccgatctgggctgggcttgagagttgatacaaatccatcagcaaaacctagttcagaaccgaaacacagcaagtcatctcgatcgaaaagcaaaggaaaggactcaactcgaccgattccaagccttctaaatcaacgacctgtccgtcgacttgtcccccgacattactctttttccattcttcccaaacatcagaccagtcccctcctttgaccgctctctccaacacgttcccctctcccttatctccgccttcttgtatgttgctcgatgtttctcctatgggtctccatctccctacagacgctggatccttccctttctcagccgatcgaaagagccggtacgtcgtccggtccgtgtcccaaaaatgagcgatcgagatcgtatctgtcctcctcggccgatcctcaaaggatgaagccagacagccaatcgagttcggaaacttttcatgaatcaaaggaatcagagtatgtaaggatgttgactcttggggtaacgtgtagatcgtggccgacggagcggccgatgggctgatgatggaccgaggaggggttggaggcgtgtacgtcctcaagaacgcagaaagatctgatgagatgacggtgtgggcaaacgagtactttcgtctggacaggccagccgttgtaggtgaatgaatcctctgtcgaatgctcatctcttcaaatttagtcggttgatgaagaacagagctggcaggatgggagattcgaaagagatcgtgtgagagatatctcgatgatgtcacgtgactgataagattgagcctgatagtttcataacgtttacgtttcccctccccggtttccagacaaatctctcttccatacacaaaatgatgatacaacaaactcagaagtaggaatatgatattacaacgaaacgaatcagattctcatcacctgaccgctgacccctagagggattccccactgatctctgattactgtgaaactgaaacaacagctgatctcctttcctgttctcctcaacaccggggtcgagctcgaaccaccaggccctaaaatatttcctgcagtgtttgtagtatttgagctcgacccagacatggagttcatagcattcgcagcagctagcgcggcggcattccttttcagaagacgcgccggaggacaaagcgtacaggtggtcaaaacggccttacgagatgtactgcaaaagagatagagaaagaacaaaatggtaagtcaatgaacgactggtcaagatctatcaaaatagtttgcagacaaggaacatactcgaagccaactgattgagaaaatggaacagaattgtattagatactggtcagaccttcttcgagcgtaaagcagacaagaaaacgtactagcacaatattgctagatcatgtgcaaaacatacttcagtcagtatataatcaaaaattacaaaccacagataccagagttcttacctcccaaaagtttaccgctgagtcttcagtcatcagctcataaatacccagctttccctaaagaatgacatccattcaaagcccaagtagaagaaaaagtcaacctcaagctctggtgagtagagaagtcaaaaaggaacacaaacgtctttgaaccaattaatgtctattcccaacagattggcaaacctgtatggaaagttgcgtgaaattttcataagtaacttatcgggaatcgatcttgatagtaaagcaaaagagaacagaagtatattcactcattgttggccttgaatatctgtcctgttcgcctccaaaacaaactaggcgttcgaacaacttttcatatcaaattcgccagatgaatatatgaattggccgataaatatctcatttttgtctttgacctattgaggtaaggacaaccaattggactgatggatgagcaaatcggacgcacccgtaaagcaccgatccatctgtaaaaccagccgttgaaacccttcttcgatcaagatcttttcctcttttgatagactggcaagaatttctcggacagtgggtcgaaaaattcgtagtggggccgagattcgctctttcgacgcctcactaacgctaagcagagggaaagatagacggaaggcaggagtattcagtttgaaacaacgatgcatctagatatgatactattactaacgtggcatccatccagctttccaattttgcccaacccaactcccaatcccaaccttctgaagcgctgaccaactgcgaactttcaaacttggctctcaagatcgcgtgtagatgatctcccaccgccaaactcggaactggctgcaactgactgtgcgctcctgacaacataggctgatggtcttcatctttttgatgccctggattgacatattgctgatgttgttgctgctgtggctggtggtgaaacgtatgctggacttcgtctgaagaaaatgggaccggatgtgacaacggatgctgagtcgaagattgtgctgcaggctgattaggtaaaggtggaggataaggatggaaatgatgagggaaatgtgtagggcttgcaggtcgagacacccttgcttgaagagctccaagattgatcttgtgctgatcttgatacgatttataaagctgatttaaaaggtcgttgaaagacccgttctgttgagcgttggcaaagagggagggagacgcggcgctcgcattgagtgaatttggtatgaaagattgaccggccgattgtgatggggaagggaacgaagtcgagttgttcgacgataggggaaggagagaagaagggaattccagggtgtttaggaactcactatcgtaaaaacaagcaatttcatgctttcgtcagacatataacacagacagtcattgagaaagacgtgatgacacgccaagacgactcacctaagacttccccactcagcatctttgtaacctgagctagatgccaaagtcggaaccagattgtctcctggtggttcttccagtcctttatctctgcttacacccaaagcctcagatgtcctcggagtcaaggtccctattccgttccagggagaggctatgggcgtcatgcctataggcgaaggtgccaacgatggatcaatcattgtctcctctgtcctcatgacaggcttggagtagtttggagatggtggtcgcaacggctttgggtttggtatcgaggtcgctttggaaagtagagagtaagcctgctgactgtctggttgaccaaccctcggaccaccggaggcgtgttcaggatatatttgaggagatattgatggtctttgagcagacggatacgattgtggtagaggcggatgttgaggttgaagctgagaagaaagggggttgtgctttgattgtaactgatgggctatgctttgaggaggaaaggccttgttcaaaggattgcgctgttgatgttgacgcaattccggcagagttgcagcgttcgattcttcttcttgctgctgctgctgctgttggaggctagagatctggtcttcttgtggaattgaaggcacttggtcatcccctgaccccatacttttcggtacgatgggcggtaggaaaggaggcggtccagcaagcgaggcttggtggttgaaaagccgtctcttatcagaagagatttcattggtagaggatgagctagagatgcgatcagcaagagatggtcgccgtgggttagaagctaaagcttggctcgacggtttgttaagagagtgtttcgttcgagagaaggaagacacgcatgatttcgacttcggcggtggagatgccgaggaggatgatgccgaggagcttgagcccaacgaggatgaagttgagggtttggttacctgctgcgacctcgacttcttgccagcgttgagtgaaacgccagaagaagatgaagaagatgcggcggtgatattagcagtagtggcggtagcagcagcgactgtcccatcggacgcgttggtcgtggtaagtgtcgatggatccaggtctgtgcagaggtgctgaattccccgacggacacacctctcacaaggacgttctgttgattgacaagcagagagacttagttgttgattccagttcgtacatagtccaatatgctgcaaagaaaaagaagaaaaaaaaacaccaaccattcgaacagaccatatgagaccgcttgcaaaacacgcatgcgatctggacctttgtcctcttcttttccctctctctgtcctttgaagcagacgactgagtctgtgctactgctgctgccgatggtggtggtgatgaaggtaatgcctgcatggctttccgcttggcagatgacatctctccaagttcgtagataagcttcttccaggcctcttacgcaagtcactgatttctctgtgagatgatggatggctcgtggtcaagagatctgtttgctttccagttcggttggttggtcaaattcagatatgattacgtaaagtgatatttgaccactgacctccgtcgatcattcggctacgatttaagccgacgccaagtctcaattacccacatccatccatctaaccatctatttatcagtctatctaatcattcagatactacagcgttctgttgacgatgccgatcgacacgtccgctaactcaaacgttctgttgactggttctcaaatctcgcaactttcttcactggaagttcaaacctcgagtggctcttctgttgcctttggatcgctcatcaatccttccacgggtaatcattcgaaaacacttgttgtggcactacgtcatttctggtgtggtctgtgtaaggcatacctcactcagctatgcgagcagattccagagagcgtcgcaaaagaacacgggatgaatattgtcgtccttggatgtggaagctgggtgcgtcctgccatcctgtctaatttgggttttcaaggaacaagggaccgactggctgatcagatcgagaagatttgcgcttgaaattgataggaaccgatcaaagactatgcaggtcggaacacgaatcttcttatacctagcaattgagtcagcctgatctgatgacgactttctgttgctttcatcttgcaatagctactacaaattgtccgtatccaatctatgctgatcccaccaagaaagtctatcaaaccttagggacgacatccactatggcgcacacacccaggtccgtactgatctcctatcagaactatatgtcagactgtactcatcttctgtcctcttttgtgacaactcgtttcttacaagtggacaaccaagaaagagttacctcaaggagtcaatgttcacgcaggcaatgggcagtttgaaagtcgcgctcacgaacgtcggatcggtcaacaaagttggaagcttcaagtatgggccgctcgaatcttcatatgcacttttaccatctatatggctctcgaccaataaactgaccttcattgatccttcttttgatcatgttataggcaaaatggaggagagttcatcttcgaatcaggaccgatcaatatatttgcgcataggatgcaaaacacggaggaccacacagagattgcagagatcatagatatgttgagcgtataggttcgaaaaggaaagagattgcaatatgtatgattcatagtttttctgtgagggtgtaacattcatgagactctgcctgagggcttttgtacttgatacacaatcaacaagtccacacaacaaatataaagtaaaaactcataagatcgtcaaaaggtgcatatagatagcttttgcgcacataactctatgaacgtgaagtttaaagaaaaatcatggaaaacgccgaaaggccaatcctctgctatgatcctactcaaagctttgaatcggcaccggtaaactcatacgcaggtttatactgaacctccttcactttctcaaccaactcttgcaaagacaatcccctcaaatcgacccgtcgatcaactttctgtttttgtgccacctggatcactcgggcagcgacctgtgcggagatttcctggattcgatctattcttgggtagagtaagtttgcggcagtctcactaggagtgagtgcttcagagagcgcgatagaagtctaacagagaccaaagagagcaggtgttacatcaagacaaggtcagagaacaagacagatcgtatggtaaaaacggggaagagacgtacagtttcaagcatcttctcagtcactcgggtggccccgcagagcgtcacagcctgtcccaaagccgggaagatataaaagtctattccagaaagagatgatacacgtttgttagtcagagcgagccaaaaagaaaaaatatattcaaaccactggtcatgagaacgagaacgtactgtttccctgggcagcttctctgtgctccccgttgaattcgatgggatcgaaaggcgaaccagaagcaaagatgactctgccttccgtccaatcgagagcgtcttggaacgtgagctcacactttgtcagcggattacttaacgggaagacaatcggtcgagggttgatctgagccatcttgcggacgatatcctcggtgaatgctccctgggtcgtgctcaatccgatcaacacggatgctttgaaaccgatcgaaggataggttaggtgtggggtttgatttgaggaatagagaagaagctccactaacgttgtacggaatcgacgacatcctcaagagacttgtattgttttccctcgttgtcgtccctagaaaagaatttcttgtgctcggccagtttgtcacctcgatcgttctttatatgcgattgatgtcagattcagaacatgttgagaagtgtaggtctttaggagcaagagagaaagagaagaggacgcacagtgatgagacccttagtatcaacgagatatattctctttctggcctcctcaggagaaagccctttggtggtgaagaaagagacgagctgtttggcaactccaactgctgccgatccggctcccaaaaacactaaagagagaacgaccaaaaggaggtattatttagcgcaaatcgacgaagaaagaggttatattgacagcattaccaattttgtgctcgcttaagggaagtccgctgatttttgatgcctgaacagcagcgttgatgagagcggtatagatgacagaggcggttccttggatatcctgttcacctcacaacacagagacttgttaagtccaaactatctctggggaccatgaaaactttaagagatatattcacgtcattgaaggtacagtatttgtcctggtatctctccaagtagtggaacgcagcctcactggaaaagtcttcgaattgcactgtgtgatgaaatcagagcgcatgttcgatagtacgtcccaattagtatacatatcttgagggccatcgcgagagcaagtagagtctgctagaaaaatgaggtgaatgaacataccaagcgcatcagggaagaccgccttcatagcctccataaactcgtccaagaatgcctcgttctcagctatcgatcgtcgtttctagataagagaggagatttagtatctgtcgatctatgattagattcttgatagacacataaagaactaaacgtacctgtcggaggccaaggtagaggggatcctcgaggagtcgagagttgtccgttcccatgtcgagaactaaattacaaaacagaaggatgacagaaaaggagtgagcatacgcaagcaagtatcgaggatagtcggattaaacgaaccgatgggcaaagtctgctcagggtggatacccgctctagttcacacagaaccgacatgacagcaatgagaaatgaattagtggtaggcgtgaaacaaagtgtaatgaggttgatggattgatggtattcacccagcgacgtagagagaaagctttccaatggagattcccattcctcccaaacccagatctccaagtcccaagattcgggatccctaagagatcggagatagcaaagcaaacatgtcaggccaaacatcacacagagatcggaaaaggttaagcgtatacgtacat

SEQ ID NO: 3156 - DNA, 8761 bp, Xanthophyllomyces dendrorhous
gatcctgactttatccttgtttggccagttctcgagaacttgtctgatagatcccttatcctcgatagatataaataacccctcaggccgtcggtaaatcttatcaaagagaaaggagcaagcaaagttcgatgaacaaatgtaacgaagagcgcaaatggagagaacgagaaggaacagacctcggagtatctctcgcaggcttccccaacggtaggagtgtagatcaatggggcaacttcggtcaagttctccgttactgttggcagaatgcagggatgtatacatcagttagtatccatcaacctcatcgaacgagattttaagaaacgcttgtaccaattttgtagaacaacctgacgttggtttgtcggaggttggaaagatagatgtgtttctcaatggccgagtccttcgatctgagctggataagggcccgcttgacttgattacccaacgattcgagggcgctgtaaagaatggcatgggagaagatgaaaacactctcagtatcatttcgaaatcaataccctgcattcgtcttcattggtagtacggctaacagcctatcgcagacgaccacagattgaaatgcgtcgagaaggaagccaagaatactgaaacttacgcaggcatcaaccctcggattccatgagcatctcggtttgaaagcgacagaccaagatctatagaaatgcgaaccgaatcaaattaattaactgtttccaaggtttggatgagtcaatagcctgcgaagtcaggtgcgcaccctggttggtaagaggatctcgatgaatgtacgatcttaacggagcagggtcggtagaacctatagaacgacatgattcggatgtttggggtgagtcagatttccttcatacgaattttccgattgagcaaaagaagcggggaaagagagggaatcatattcagtgggtaggccagtaactcaccaggcagcattgcgcgagcagagtcgacgagagaagctacagaaggcatggtcatggaatctttgctgttatttttattggtagtagtggtggtttggggtgaatttgtagaagtcgtggatgaaaccaaacgccgctgggagtattgtgtattgatgggatgaagcttcgagaagaggagagaagtgatcagatggtctttatttgtgcgggagagcagtcgggaggatgacatggtattcatccgcttttttaatttttttctcggctcaaacccgggttgatgatgagaggaggatggaaagaccgttaaaaagagcgactcaaagaaagacaagagttagaggaacagtgcaaagagcaacaagcgagaaaagcacatgtatagcagatctgtataaaatactggcggcaattgcctcattgggaattctttcgtccgagaatgaaggagggtgtgagaatgtgcaggtactttactggttaaaatcggttgattagatcaagagatagcatcatcatggctttcttcggatttcctcggccgacctcgtgaagtttggccgatccgatgtaatataccatacacctatacggccactcgtgattcatgcttgttcaggtcagaactcgagagcaaagagatgaaggcgagattcagctggtcgtctgtccgtctatatgtacgtcactgactctgcctatgattgttaaagatgattgttaaaaatgattgttgtgcttctcttcgctcttgttaccatccttcttcaagtctcctcaggaaataattccgataaaacctccagatttaagagtggctttagtcgtgtgcgcttatttttcggcttttcctaagctttcccgaaaaggaagaaccgaggggaacagggatttcgccgcccatatgttgggggttggacgcccatgtcttgggtgtcatctgtggtggtcatatcggtgactaaccgaccggtttcccaaaaattatgcgattcttagagttgaacgacttcacaatcttgtatgggatagacaatataagttatattatcaacacatatacacactctcaaccacgttcacaatcaccatcaagtctccatgcctaagtctgctaaacagaagaaggccaaggtggcagacttctcggtgaggatggctcttttctcgcactcgtcagaatataactatactgactgaaatatacccttctgttacaaacgacaccaatacttggttcaacagaaagcaaagttcaagcttggtaaagggaaacagcaggctaacaatgcgactgatacatcttataaggtaagcctcaaccctgtctttaaatactcatagtctcaacaaggattgcaacaacgcctaataatatttttttgttgaacaggctcgatgtgtgtcctcatatccgctccagcaataccttaattgtgtcttctctcacactcaatcttttcaatgctgacctgcttgtctaatacttctctatagccatcgttctacctaaccaatcgatatcggtagagcatgatgagaccgtccctctcaccaaacgaaaccacacttttgcagacctgatcgttcaatctaagcactataacgccggcatccgaaaaggtatcgttgttgtaatctttatggtgatcgacgagcttaaggagactacaaatcgatccttattccccttccttgaatacgtttgttataatctagatgccatctatggtttgaaagaaatcttaactgcgtatccctcgctcagagtaaaggaactttcctcggtcgtgggcgtaatcgtcagatatatcaacgacgaagtcagtttctttatacatttcacgtcaagtctttcttggtgcaacccactgacccgttttccctcatttcattcaggactcatctgtccgaaagacccttcccgtcttcctctctcatctattatccatcctaccccattcaggtctcatccctcacctacctgtcatattccttcacttctcttccgcgctttcccatatatttcccgaggtccgaatagatgcagtcaagtctttccgtgttctgctcgagcactatccctcgctctgcgtcgaaggatgggttcagaatagagggaccggtggaagagccggtgaaggtctcatgggagtcttgggtcttggaggcgggaacaatggagggaaacaacaagctggtgtagcaagtgtacccctcaaatcaggcgcaaaacttattgtccttcaggccctggaaaaattcctgaaggcggctttagactcgaacatgccatccacttcgacagcatcagcgacgtcttcatcctcttcaattgcagcaacatcccgagaatctacctggttctttgctcattcgtttgcgtctcctgtggcgtttgccgaattttctaattctcttaccagcactccttcgtcttcggcgggacgggttgactcttgggcgcttggaactacaccagacgcttgggatctttcctctctggccataaactcatcttcgctttcttcttcctcgctcatttcctccagcccagccgaaggaagagaaggaagtggcatccaaccggttgagagaagagaaaaggctagggctgcagcaggaatgtatcaatctctccacccgcttctgctttcaacattcttggatgcagcaccaggcgcatttgatccttctggatcgatcactcaagtttcggtggcgggtgaggaactggagctgattgccgtggtaggagaattagcaagtgtgctgggaaggacagtcatgggaaattctgaatctttggttcgtagctttttccccatcatttggtttggctaaattttccaagagctgtactcaatgtcatcgggatggtgagctgacaatttgtgcatctattctcatacactctgatacatgcatttttcccaaacagccaagagaaacgttgagtggagtcaaaaagggtctgagaacgatgttgaatcacatggccgtgtactttcccttcaattcgtccactttccagaagagggatgtcaaagtatgtccatgataagtcaacatgttcaaattcttctatgtttgtacaatacagctgatcatcttcggtttcttctgtcctgaagtccgaatctcttctcctatcgctctctcttgcattctcctcactcgttgctcaagtgtccttgacccactcttcagtcgcccccagaacgaagagttcgaaccctaccgagaggaagaaagcattggaagaatgctatacgagaatgagaaaagggaccggggcgagcgagaaagtgttggttgataaggtcgctgtttgggtcagcgagctactgagaggagaagtgagtcttcagatcaattgtcaatatgaaagctctaaagtttcaataccccgtctgatcaaacaacacaaaccgtcttctttcctcgcagaccgtttcggcttcctctcctctaggtcaatcgcttccttcccatacgtatgaagctctccttccgactatttggtctctcctttgtcaacctcctccagctccggctgtcaagacagaccaaactgtctcacccgtagagaacggaaagaacgtatcgctcttgattggaaaggcagtgtttgaacattacaatcggttgaagagtttggatccgacgaagaaaatcggattggagttcttgggcaggttgtgcttggtatgtacaatgtttcttttccttctgaacccagtctctcagtttctctagttgtgactcgagatgctgacatactcccgttttgtccttcttgtgtgtaatcaaaccccttcctcccttcagctggagacatttaccttatacaacggtcctttccggttgcgtgaaccttcgtccgttctcacatcaggtctggcatcagaggtcgagaactttttcaagacgttgcctcggatcatctgggaagctggaagtaaagatcttcaactttcagaggtgaattttcatctccttccgcgagaatcaaggaagatcagtagactaactggactgttgccatgtcattcgattttgatatatgatacacacatagctcgtgcttcgacttactcagacaatgctcaagacctacctcaatcgcatcctccccgctatcctgccatcgtttccctcgtatttcaccatgaacattccctcgcgcggtgcgcttcctggaccgtggacgaaacttcctttggaaggtagaggtcgagttgtcaggatgctggctatcgataccgcttggttgctctgtaatctatcgatcttagaaggctcggctgtagctgataaagatcagagacaggctttggagaaagcggtcgagcaagcagtagatgttgtcgctgtggaagacaaaggtgaggcgagtaggtactgggttgggttgaaagaacttaaaagatagaaatgaagactttgtcgtcatcgtccttgtttacactggattcttcgagagtgagatacatatatagaattgttcatcatggagagttacttgaaccttttttttacatatgtttctgaaagcaagcaaaccggttgagcgtgggaggacgggatcaaagtagagaaagactctttcaatttctggcggcttctctgacctcttcctcccaaaccttcttgaactcctcgatatctcttccgccgcctatacagttgacatcaactgggtaagcgggccaggcaggcgcattcctcgccgccatcggatgagccctggaaggaatcatcaaaagaagtggtaggctcgtgatgacttcaacgtcttgttcttcctcatcatcgtcgtctggtgtagtttgagacgctggtaagtctgaaagagagagagctgaaagagcgtcgattgggtgagagtctcgtgagagtgaagatgactcagacccggtacatgaaggtgaggacaaggtggacagatagagctcgtgcagttgttcataactgaaaagaagaggagaagtatgaaacggatggtagggtgaaaagtcgacgatgtgtgcagatgaaaggttagatgtcatatagacatccacgacgtctgtaattcgccatgacaagtattattggttaggctcgagaaagggttcgcagtttttctgaagcagctgacattataaaagaagagagtaggaaagaatgaaacatacagtcgggcccaccggcgaatttgccgcgaatggtggtgtcaaagaactccagcaacgactggtgtatcttcgcttgtgtgtccggatccaccagatgctcataaaagtttgtgtctcgctgacagattcccagcagtgtgttgtcccggatgaacatcctaaattctctggatctgtcgagatcataccactttttgagaaccatctcaagtagttcgccttgaccctggtcctcggtttcatcttctattaccccgtctacggcttcttccccatccgtgcgtgtctgattgagcgcttccattacgccgttcatgagcccgcttgctttaagaaccataaaaaggtcttcgatgctgggacatttcataggcagtggaaaaggcaagatccattgagcatcttgagggcagacagagttaagcttaggaaatactccggacggcttgaacgttgtgaatgtggaggcaatatgagatgtgagccgagggagtgaatacacaggaggtgtagaggatgagctagatgaactacaagtggtatagcagaggtatgcttcttgagtaattgatttgtcaatgaataagaacaggtagaacagacctatcgtcgtctgccacatcatcatcatcatcatcatcatcatcatcagcatcgtcatcgtgactctcgaggtcctctagaagaacaccatccggcaacctcatcccatcctcgtcgaaccacttggtgaaggtgacttgctcttccggagaaaatttgaaaaccgtccctctgatagaaactctcctaaagactgggtaccattcagagaaccgaaaatgacgaagtttcgatcgggtcaatgtaggaacaacttggggtggcgatggtgcagggactggcattatgttcgtgtgcttgatcgtccgactctgtagacgactacatacatgtgaggttaatgacgatgaacgtgagtgtagggttaagagccgatcgattcttaggtaatcaccaccgcggctctggcccagtcaaaagttgcaccttctgactatgaacttttcccatgcctttcatacttaccttgagttgacagagagcgtcataaaactctctgtcctgtatcgatcgctgacattgcacggcgacacatggtcctcatcagcttgtatcggtagagtgtggttggttcgccagcttcagattcgtaatctttctcaagccttcattctcccttcggggcgggcggaggtgcatcctttttggttttgttcgtctgcttcaatcatttagaacgatttagtatgcacgttgtgttgcttagtttatcacttataacgtcaacacttcttgggagattatttatttaaaaatggttcatcgggtacatatgcgttttgtatggggtgtatgtcgagaaaagagttgtatcatcatggaaaaagagttgagaacggccaatggaagtgagatctttgatcgtttctctactcttggtaggcaggtctaaggtccgctcgccgtggtgctatgcaagtcacacaaaatgagtcagatcaaggttctatcttcagatcggcacttaactaaacagactcatgatgagacatctcaaaaggaaaaaaagtactcacagagtaaagggtggagttgcgacagatacgtgatcccccacctaagaaggaaacaagacacatcatgacatcacgttcgatcagacaacatgatgatattcggcgatcaaagtcagcaatgagacgtgtatacgattgaccagccggacaaaggtagaacagatcgatcaggaaggagaggtcgtacataagatagcatgacgtgagagcgagaaggatactcgttcggatcaatctattcatcatgaaaatcacaatcacaaatacggtcaggttggtcatccgttggttgatttaatcgaaacatgaataggtagtgaagaaacaaagtggatagagagataaaagtcttgtaaaggagaaggacgtacgtctgattcggacctttgggaatcacaaaccatgagccagagccgagagcggcctacaggcagggtcgacatgcagaaagagagagcaaagtaatcagcggaagaaagacacatcatcttagcagtatatagggggatagaagaggttcttacagcgatgagtgcaataacaaccacgagatatccagacatgttgtttgaacgaggtcaatgggtttgatggtttaaagcaaaggagatgagagtcgcgttggattcgtttcaacggcgagcgccgcctactttcactttcctcctctacataccaaaacgtcgagccatcctatttgcttgagacacacctacttcaacccattagttctcttcctctttttcacaacatggtgcctacatcggttcatccatcccagagattcgaagtctctctcctcggccacttagcgtcttcaatccatcctttgttgatcgagaaactctcgaggatgtcgatactatcctccccgttcatccaggaggaaagtctcatgcagcctttggctagacaaataggatcgcgagcagaggatggaacgatcagagctcggaaggtggatgaggatggagaactcatgacgtccgtcccttcttctctaatc

SEQ ID NO: 3157 - DNA, 5973 bp, Xanthophyllomyces dendrorhous
ttcttatactcatcgacctaatctgacgtggctcattcactctctccatttgagcagatatcttgtaggcgctcgtctatactaaaaacatgcctttctgttattatattgaactcaccacgtcttacgagatattcaaagaacaggtagcatatcaacgcccagagtctatccgtgccactccccaggtaagctctatcacgttctcattactatctcatttcatatgcgatatgattctgacgtctagaattgctcacttgtgtctttgcaattctcttctttaaggcgctcgtgacaccgtgtacgtacactcaaatctcagccgggtgttcaggagaggaagcagctactcaattaggctttcaaaagtatgttttcctccgactatgtttcactcttccaatcctacttctttttcagccgatacctgcactctagctgaatatatctgatgcattgatacttaatttagagtctcgagctcaacaaaaagaggatttatcttcatgctcgccgttgggctccgaatagaagtttactcactcgacacaaacgacgtggtacgcaacacctatcatctctttcatcttgtgacctcgttttcttctttctaacgcccattcaatctttacatcatgttgcgcgtatgaatatatagcgctctccgtctacaccggaaacatatacaatcaaagttctgtcgcctcctataccttacgctcttgttgctcagacgatagaacacgctctaaacatcagacgacagcttgttggacttgtgaaactaggacgggtcgagggatcaaattaattaaaattctcgaatgatgacaatgataatagtgttagaatacatgcaaagattgcgtggaaacaggtgaaggctgaaggatgggaaaggtcaaaaattcgaagtacagaggtcttgagcgatgtttctcttgtttgatgagaccattcgttcactatgaaaggcaaaaattgatatcatagacaaccctatgacacatcaagacatatcggctttgattatagcttggagaaatggtagaagacatatcctcagaaggatatagtccttacacgtcgactagttgtgagtagcggcgtaggaagaattctcctgaaccaagaggaacgatgacgttaaaattcattgaagctgatttttgcaccgtgttagaacgcgcctatacctacgactaccttcgccaacaacttgtagtcgactgactaacttacagacaacaaccagaactcttgccatgacttccgatccaaatcactcagatgaagactcatggtcagaatcttccgcttcttcatcaagatccgatatcgctacaagcacaatgctcggtcttcccgatggtctcattacccttccctccgacctctctgacccacaagtctctcacctcggcggcagaccttccttcctcactggtatcaaatcagtgcctaacctgaaggaggcaagttgtcctagctgtgagcagggtatggagctgttggtgcagttatacgcgccattagaaggaacggaggatgatcgggtggtctatgtctttggatgcgcgaggggaggatgtcaaggtgagggtgggaaaggaaggtttgtataagttctttctgcatttctatctttttcgttttctctgtgtgatcagaaaagcctaggaggaagaaattatcgaaggagatttcttatgagacacaaaggttgctcatcaatccttccacggttttaaatctcatatgtatagtgtccgggcgttcacttctgtcaagcgtagtggaagctcttcaactactcagaagctggaagagattgaccaggcccgagtaaaagttgggcagctccagctgagcgacaagactgttgattctggtgagtcgccttgtagagactcaagtcatttcgcaggtaactgtttaacctcttccaactcttgtgtcctaatcttttggtttttctatatctagcctggaccgagacttctgcttacccggctcaataccttgaaactgagactgaatacctgacgaagaccaaaagctctaaagccgccgaacagacatctctcgacgctgcctctgctgctgcttcttctgggaagaagattgtggatgagtttgacttcacgctaaaggaaagtggaatccccgggttggatgaaacacttgaaaggtttttgggcaggctgaacgaggagccagaacaggtcgtcaggtaggtgttctctagccttgtagttgtctccatccgactctcttctatcacagatctgacctcttaagcaatcataaccgatcagatacgactttggtggcaacccgctcgcttactcctctacatccaaacttcatcaactcctctatcaaacacctcctcttcccacaggaacgctcgggtctacctctggtcccaaacgaaaggtctttgacccgacgcgaattccccgatgcgatcggtgtggggcggaccgagcctttgagcttcagctaactcctggtctgctcactatcttgagagttcaagaaatcacaaattcttcctcgcttttcccgaccggtggtgagtcgattgaaaagagtgatacagacaagaagaacgaaacagacgcaacggagaaagaggaggaagaagcaagaaggagacaagcagaggtacacaaggttctagagaagaaagatagggaggttaagacgggaatggagtggggaacgatctgtgtgttcagttgtgtagacggttgcggaggtgagtggggacaagaatgggttggagttgagtgggaagaataaatctatgaaatgtactcataaggatctcgactagtcatcaacagtcttccgtctttcttgatcttgaaactcatagaatatcagcgatatcgtccttaaaagaaattgagaacatcgatggttatgtacaagttgaggcgcgcaacaacatttttggggcaaggggaaaacacggagagtgcgtgtgttgatattcttggcgacctacgcttgctccctccgttccttgtttcccaaccgccatccagccacatccatttctctcaacaaggattctttctgggagcatacagttgttctctctagttggttctgtcatgtcagaggatacctcttcagccgtaggccatgttggcgaatgcgatcggcttgaagagccgagtgcgtcatcaattagtccgtgatccacacctgtccttgaacctgttgggctgaacacctgtcgttcagttcagctaaattcggatgtctatacttactcatttcttgtgccgtcaaacactcatgtttctgttatcagccttcgaaggatgtctacgatcattggtcccagccgacaaagctatccttatgaacgaacttcctcagcgtatgtctacgacttcctcactgactatggttcagatacgcatatatgcgtttatctatttattgtagccgtcctgatgaacgcgtttttgccgtttgatcgatgttctcacagtactggagaagcttagttcagaaaaggatgtccaaatcatgacgtccgatcagatgaatatcatccggatgtacgccgaagcagaacctgatctagagattgacctggaagggctactgaacatgtttgcgtgagtgtcaagggacagatcattcgtctacagttgaccgctcaatatctgacttggtgtcactctctagtcaaatgaacccggggtcaatggagaatgcgtctcctacttccgatgcttctgtccttggaacgcctgatctgtctcttgatctgacagattgctccgacctcaccaatacaaagtttactcttccagccactccttccacatcatcgaacccttctacagacccaccatcgaaatgctacaagttgaaccaaatttctaatcttaattcggacggtagcgacactcaggatctttccgtgaatctccaggattcttcccgcaagtttcagaaagcacctccaaatagttgggaaagattttctagaccaacgcctttgggtcatggcaggagacgaagtggaggctctattggactggcttcggctgccagcgatgccggaagtgaaggtgaaggagcgaggaatgaggtgagatgagcttcgtctttcttcattttgaatatagagtatatgcactttgtttgtcctaaacattcctttcggtcgcaaaaacgcttatgagaaggctcaaatcgcctctactcccacgatgaaagaccgccgagcccgaagacgttcccgtcaggtatcacagcctactgatctgccagcttcgggtggttcaatcagtacccctccaagacgggtttctcatgacggttcatttttgagctcacctggtttgaacgaaaatagtttcatctcagcggctaatctggtcagtcctgattcagttagcataccaaggaatgagcgtgagggcagtctagagtgggatggtgaagtgaagagcagaggctctctaaaggatgaagacagtctgtgtgtacgtgctcgcgcaatcttttcctacaattctcttactctcattctgacaaccttggttctgactaaatcaaacaaaaaaaactttgccaccattctcttcaatacagaaacaatcgacagactccccgcaagagctcgctgagatgcaagaccggatacaggaattcgagaagactatcgccgatttgactcgaaagctcaggattgctcaagaagaactagaacagactgcaacagatagcgagaacttgacggccgagtttcaaaacagacttgaggaaatgaaagcacagttgaattcgaagcgtaaagaagaaaaagagttgagaggaaaggagagagggtatttagaacagattcagactgtacgtggtccgtattgggcgcattgagatatccattgccactgacacttcttgatggattcttctgactgttagtttgaagcagacgttagtaaactacatcaaatggtggaaatgtcgaaaagcacatattctacgctaatgaagagctacaacgaacaaataggttagtcatcgcctcatcctgactctttcgacttgaaagttcaagatagatgctgagcattctacatctatatgccctcaaccagccgaatgcgagagcttgagaaactccattaggactcaagacgtcgagttcaaagctacgcaggaagttttggatgcattggaaagcgatactcagagggtgagacatctatctatatttcttgcattcagtttgtgtttctattgatgttttgtatcatggctaacaacctcttggctcctgacagctcgagaaggaacaaacctatctcaaacaagccaacgagctacttttacttgacctgtctgctgcccggcaagccgagaattgcttggaagagcagagaatggaaaacttgtcgttgaaagaaacgtgagttatgacaacactcttcatactttcttgcgtgctatgtgctttaaagtcccaccctctctgaatttaaacacctcagcatcaatcgacttcgagcagatctagataacctccgaacgatgagtgccgccagtctggtttccattcaacgcgttcaagcgcataatggccctgaaactttaggtcgaagcttagagaaagagcttttgaagcaattgcaggacccatcactagaggtagatctggcggatccaatgagatgtgatggcgcgactgaaaacgagctagataacggtgatggagaatcgcttgttcaggcgttgttcgcggcttctcgtgaacaggtaagatctctctatcgaagtctttcttagttttgcactcaagacagatatcgattgactcgcgattatttccttgttggactaatagtatcagagagaggcttttgacgaagatgtcgaaactgaagatcagcctgcagtaatcgatcaggaagactttactgtacggccccatgc

SEQ ID NO: 3158 - DNA, 3961 bp, Xanthophyllomyces dendrorhous
ttactgtacggccccatgcagcttgagacacgtatgactttctggaggctagaacgctgatcaaaatttgtcgatttcctctctcttaaaactcaggtggctcctgaagaagaggggtctcagatgcaggtgccaatacggacggacgaaccaatgatggctggtcttccagcatactctcctcgaactgctgaaagtctacccacaggaatatcaactcagacctctttgatcgccaccgctatggacgattctgtttcttcattgtcgaccgtcgataaatcaggttggttgacaggtattaggcagcgacaaaagaagattcgaactgttcggttgaaaccatcattgtttgtccttttgcccactttactcgccatacagcgggactggtgtctgttaactgctctgctcttgactgataagatttcagatggtcatttgtaatcttcaactttagtttcacagatagtgaggcgcatccaagctcatctctgtctttcgaagcacacttctgggattttacaaagcgacacggacggtccatcattaccggagcttttcttactggcgtcacattctaccgtaagctctcgacatttcctgatttttgtgcagcctttgcttcgatattcataaacgatggtcctatttggttacagtcggagtcgtatatgccgacaatcagcatccaatcggaacaaatcttcaaagcgttctgtctggcgatgccagcgtatggcaggtacgttatatgctattcctatcttttggcttccacgggcgatcctgatcatgaactgtacgattgatgattttctcggacaattgattgcagtactacaatgacctcgcgcgagctcaaggcgcaggagtaggcttcagccaggtaccttgggagcaacccagctggttagggtatctaggtgccatcggaattggtgctgttgaccatgttaccaggagagtgccaacctgagagccgttggaattgtgggttggaatatgtcggctttctcggtacttctacttttctctctccgttgtcctctctctttcttctctcgtatttacttactggtatgacgcttcacgactctcctacacatatacccatcctgtccaccgcttgtgataatatatatatatacacgtttgtaaacataatctctcacggcatcttccactgctgcagttgatgtgttcccaaccgaagatgcaaacgctaacgaaagaaaacggcgaatgtccttgttggcttctagatatgttatatgaccacataatcatgtagtcacacaaactcgcaaccacattaccgcgtaaccgcgtaaccaccaccacgattctctccacgcgacgcctcccgcttccgctcgtttgactcatcgctctctcaacctgaggatttccaagctagctgatagttgaccttcatccttcatcaatccgtacactcaaggcggtcgtcgttctctctcatccttcctcttctctctcttcctgacgtgtaaaatatgggaaacggtcaatcttcccctaacccacatcacacaccgcgcgaacacaaaccatcatcgtcccatcatcacctctctcgttcgtcatcacctgctgcctcaaactcggcgaacaaccgacggaagaaatcactcgaacttccagacctcgccaatctcaccctcactaacgttaacggaacggccgggtcatcgccttcgtcgccatacgctccggaggccctcggaaaagactgccagaagagttcgttaaagaccggaaacgcgaggaacgttcctgggtcagcaaagccggttgataacttgggtcttaagaaaagaccttcacctctcgctccctctttggtaacttcaccactctctccgacgtctcccaaatcctcttccatcaacgccgttcacaacctttacttctcttcgtccaatccaacctcttcttcttcgtctgccaacaacaccaacacgtcatcgcccacccacgtagataacgttctaggtagcagaggtgttggcgccccccgtgaaccggttcctattcccaaaaccccccaaacgcctaacgccggccttccaaactattctcgatcttacactcccaatcaacgaaccgaatctgatcctcctgatagacctccgtctaccgcaaggggtgatcacctaaagcaggccaagacggcacgtatatcggacagtttgccagaggagcatccaccgctttcgacatcgcctgcatcatcaaagcacagcaagagggatccctcgggtacaggcgaagatgaggtatacgttcgaagctcgctaccactaggcggagcggcctcctctcccggcccgcatgtagatggcaccgaagtggcttcgatgggcttaggtctgataggggcagatgcgaaaagtcagtctgtggagagaggttttggaagcaagaagactgctacacgacaggtggaggatcctaaacaggcagagaaggaagtctttgtcaacgtgaaggaagaaggcgtgccgacaatcatcaactggaccggaggaggcaaagaagtcttcgtatgtgggacgttcgcaaagaactggaaggagaggatcaggatgaataagaggtacgtttctgcctcgttcaaccggttgaggtcattctgtctcccagagcggtcgaagttgattgcagctgcttctctttggcaacatacgaatcacgtcgcttatgtgtatcaacttcaaatagtacacatgactttacgctagttctaaaccttccaccgggtccgcatagactcaagtttattgtggacgaatcctggaagtgctcagacgacttagccacggctacggacgcggatggaagcttagtcaattatatcgaggttcgtccaatgcatagggcaagaataaccaagagagatacaacagatacttatattttccttttattctcaaactatggtatgcaggttgagcaggaatcaagcaaagatggaaaaggctggagctcagagtgggagggtgcggctgaggataatgatggtgcgtttgttaccttctgtctttctgtctttatctggaggtttagacgatgtagacctattgttaaacttacctatgccgtcttctatcttaccttttgcatcacagatgatcctgatcaatggactactgaaattccagaacttctcacgcaaacccaagcggcggaagaagctcatctggcgtacattgccaatctgccaccagcaaaccgacaacccggttcggccgcactcgcgaatccgccaggtttgccgtacccgcctggattgccaagacacctggagaaggtcatattgaacaacccgccgaaagatggtggtcaaggaggctcaggagggccgacagaggagagtggagcgagagggcgcggagcaaagagtggaaataactcgatcgctgcttgctgttcgtacacccttctttgccgtcgcttttttacctgccatcccttcagtcgtggcgtctttccctctgtgtgagattaacgagaaagctttatctgaattgtctttctttctcttcctggttctcaactatcaacagggacggcgataccagatgataactcgattttacccatcccaaatcatgtggtactcaatcatctgacggccagtgctatccggaacggaacgttagccgttggaacaaccactcgatacaagagaaaggttggtcttttctctatctatctgtcaacatgtcgcttcccatgactgcagaatataatctgatacggtaatctaccttggccaccatgattctagtatatcagcacgttactctacaagcctgtcgagatacgggattgagtcatccgtggatgaaggtttctttcttgagttacttgacgagttccaatcagcttccttgtcgattctttattctttttatctaatatcatcttcttttac

SEQ ID NO: 3159 - DNA, 10211 bp, Xanthophyllomyces dendrorhous
attttcttttgtgtcaatcttctcggcttgatgattctgtactcatacgtccatcttccttcgaccatccccttcttccttgtttcctctctttcgttgagaccttctatctccaaacggagtagtccgggtctcaactctctgatgtcagcatatttgcccatcttttcacatgtgatcctctctacatctacacacaccatagtcctcttcgatctgggcttgtttcatctttacatctccttcctctgtcccccgctctatcaatcatatttctctctttttatatacttctggtcctctttcctccgtggtgtctctgtatgtggcctcacacgaatcgcagatagaaagacaagataagacgcatgcgattgtgcatgtgtcaagaagaaggttgggtatttactttgtttgtctgtctgactgtctgtcgacagaatctgtggttgcatgtaaccatggtcttatgcactcttaattatattctcactctctcccaatcttctcttctggcttctgatgtgaatctttttgtgttggtcagaggtgaaacatatgtgatagatcggatgattttgaatgcataggacatgggaaggcaaagctttgatgtattgtgtgagatggaaacaaagacaaaaagagaaacgagaaaggaaaaggagaagaaaagaacgtgtgagatacctgtgcgaaaaagatgagataagacgtgaagctgagaagaaagaaaggggtagaggcagaggaccagaattggaattgcatgcgacgagaaggatagcaaacagagatacatgggtaaggataaaagagggtgataagagtggatcaaggacattaaaaaaggaaactgtgtaaggagattggacccttttttcttttttgagaaacgaacatgagacaatccgatatgtttgatgacagtttgaacgtgtttcctcatagagacaagagaaacatgaaagagagagaaaaagacctggggatgttgaggagctataggtggcaaaatgtcaatagagaggatgtttatctcccaaagaaagcagaaattcctcgtttcttctccttctttgatttcggaggctccacatatgtatcaagcttgtttgttgaagtcgacgccctgcccaatgatgcgtcatctctgttctgagattgagtctgcatcatcaagcctgatgaaaatgaggtggtgggcagatgataagaatgggtccggccttccgactgcacaggtacggggaagctataaaccgaggaggctccgcctgtacttatgtatggttcaggcgaagaagatgggaggggaggaaggtccttgtccaggttggatatggtcgagatcctcttgagatacagaggacgagaataatacccgtcggtcatggagggcgaagaagcttttgactggaaagaaggcatgtacaaatccgtctgattttgcagtaacgacgagctcatctgcgaaggtgtcaaggatgttcgagaagggaaagtgttggccgaataagatttactatgcagtctttgatctcgttccccagtaggatcaaagtcgacaggaagataccccgtctcggacgtataatccccagtcatccttcgctttttcccatcgaacaaagacgcattcaccggaccacttccatctccattatcgacgacgatgagtccgctcttccggctacctaatgtctctctgctgatctgtcggtcgaggaaccgcatcgatgatgtgggcggagacgacgtcatcgagggagttcgttgatgaggtgggactccatatggcaaagacgggttgctcccagcaacaggtgtcgagactgatcgaggttgggaagacgaatagcttacgccggtcgagagggcaggtgggaagttgccggagaggcccgaggaaccagaacccgatcgaccgtgtgtggacccactgatatcaccgtaccctctaggaatgttcggtccagagctatgtgaacctgaggagcttccgccccctcctgcgcctgctccagacttcttcgacaagaaggacaaacttgggggaggagccaaaggagaattcagatcgtcttcccccggagtttgaggtctggattgactgaatgttccagggttcaacatctgaggtgaatttccaaagctcgatgttgtccggaccgaagcgccactgcccaacttggagaaaaactttttgatccctcctttacgcttcttatgatctggatgatctggcgagtgaggttgcgtgaagagatgagacgaaggttgcataggtgaggattgggagtagttttcaaattgaatggtagaggcaccgagtgtggatgtgtgatcgaactgctgacgccaagattgagaaagaccatcgatcgaagcagctgcaggagggtatggagaagagtattggtttctaatggccctctctcgttctctctcgagtccaagacttataatagcaaggtagacgttttggttagtcaggcttccgtattcactgatggtacattatggtgtcaatcaaaacttactgcatgtcaaccatactgccgcttgctccatacatactcccctctccacctgctaaatcgctggtctcacttcttccactgccaccagcaagcctacctttaaagattcctttggaatccaacccgattgagcttgagctccttcctcttcctgcccaaacagcaaaactaaatggccgaacgactcttgaatctatcgaattcgggctaggtgcgtccgctcgagaatccactatttgctgatgagaagtcgtcatcgtcggaatttgaggatccgagtatggctgatgattcggtcccataggtctcgaagagtttgaaggcgttttctgctgtaagaacaaaggcatagtgcttgaccgttggtgtgctcctggctctcttccaggtggaaacccgattgcataagcattcgaggattcatatccttctataccagagctctgtcgatgggcgtttccaggtggcccgatggattttgcaccaggactgtttaagtttccattatgagaaacccgggctcgaccggcagtcgactcgagcacgccaagattatttggtgggtctcggcgagggctggcgagcgagctgcgcactttgtgtgaaagagcctttggttcagattcagtcataggcagattagacaagctatctaatgcgtccggatgaatcaatgtaagctggttgcgcaagtagacttgaagagtgcgaagccgatgggtagacgcaggtgggttctgttagggacgaaaagcaagacaaaccccgttagttgagacaaaactcagaatttttcaagcagtggaaattcaaaacggaccttgagtgtccattctttcaaggcgctttctgtcaactggtctccggcaattgaccgcttcgctggcatctcgaacccaatcaccatccccattccaacaggtcctcctccctcccaatctttacttcctttgagtagttcagtcacgtcttccccggctgattccctagagacgagatctgcgaaatcaacatcagaatggcgtgcccatattccaggagacgtgacatcaaccatgattagatccctatctcgagttaagcatctgtacgtaacaaaaaccacacgcgcacatgatcaagattgaggtaagctccgtttctcatatgacgatcgtgaattttacagaggtgaagaagactataagaggaaaaactgactctagacagacttccgggccaaaggatgttcccttctgtcctccaccgccaccctgaacacctagtctgagtccaagtcctggatccaaactccttcgagcggcctgatatggcccatcgatgtcaaacgcttccgatctcggtctgaacatgtcgtttccgttgggaaccggaggtggcgggggtggagtcggactgaatgctgtcaaagattgtcgaggtcgagatgacggagacgaagtcggagggagaggttgtgatattcgtatagatgtcgaggtgtgcgttgggatattcgagaagaggggcggctgaggaagtgcgcgtctgtctaggggtggagaggaagccgggtcaagttcgcccggagggtaagatagcatggatgtagattcggccaaaggggagaataactggcgggatccaattcctgcatagttgattggttcttcagtcgaagcctgcttgtcaggaccttccgcccgggagaatttcgactcttcgagttgcgagcgttgttcaagtgatgtgagactggattcaatcttggaaggatctaatacagaaccttcgcaaggagattgaacggtagcgtgtgctgattttgaatcggacggattggttgagaacgatggtgggatgggtagaggaggcatagacagattaatgtgtgtcgtggctgttgatgtcgatagaacggccgatagattccccgaagcgctcgtcgcagtcgaagcggacagcatgtttcccgctcggggcgacccaagcgcggcccctcgagtcgaatgattaggggaagatgaagacttgagggatgattgagactcggcagtgccttgccgtcgaactgcgtacccattcctgctgtcctctcgatcctgctcggttttctgttgagacttggagttttccggggcaaactcgtttgaaagactgtgtgaatttcttggtgcatctcggatgcccaaccccaacatgacttcttcatcaatggctgcaatgttacctggcataacgctcgcacctgtcgttctctgcctgtcgactgttattgaaccatcagattccaagtcttgagaaacatccggttggcgcgtatggatgaaaggctttgaagagatttgtaagatttctggtgactgtttttgcttttgatggctaagcgaaggtgcagaaggtgtaggtgtggatatctctctggcagtcgtagctgaagccgacgctttcctaggagacgtcatgatagacgattgcgatgatattactgagccagtccgaactctttcgcgccggcttctcaagctgaagcttgacgttccacccaggttgggagagactagggaggatgatggtggtacagatccggagggagaagacgaacgttgatcgaaatcttgaattcgaaaatctttaagggtatccaaatgaataggcgggtaatcaagcacgacgggaggggagatgggtggagctgatgagtcttcacggtcggacaaagttagtgtaggaaaaaatccgtcaggagattcttcaagaggaagaaatccgttggacgactgaaactcctataatggaaaggagaggtaaacaagccacccagaaaacgctattcagcctaatgtgtctcgagacccctccattggactttacgacctaaccgaaagccattgctaggagcgatgatgaacagatagtttggtacgtacaaaggggctcacgggagcgacggttggtaggtaatctgatgtgccaggagtggatgaatggctcgccggacgaaggtaggagccattcggtgaatccggtgtagatccccggctactggagcgtgccatagtgctgttttctttggtctcgtttcctcagtctcggttggatagaccttggaggcgattgatcaacttgtacaacctggtggaagtaatcacctctcgttcgagggaaagagaagtagaaatcagagcggaggatagaaagggaaaacggttgatggaagaaagatctcactagagtcaaacaaatatgaaattatgacaactcctcccagttgcgaatctcagtgggtggcagaattagagggttctcgtgttctttcttctctactgttttctctcgttagtcttgcaccagtaaacgttgagatagcgaggaacttgtgaaatgagactgaaaacagacgagtgtcaggaggatcagaacacgaggaaggtttcatcttttgcagcttgatatgtgcatgcatgcaacaccaacaacatcaaaccaactcgccttgcatccataacagatcgtttcccgtcttctaaatgtctctcagtctctctataccacctcaaccagtcgctattgtgcacacccagaaggagattacatatgatacagtcttttttttctcttgtgttctactctcggaacagaaatagctggcgtactctgcctcgccgcaagcatcctcttgtcgcaccatgcaggatataaattatcattgtttactctggcttggatggcgctgagctggtctcgtccagcccaaatggtttgggggcagttggtccatcctcaagtctgttgaaaaacaatatcgccaataaacatccgtcagaaaatgtagatttgaaaaagaaggtatgtcgaaagagaaaagaatcgggagctcacggcgggggggcagaatttcctgagttggcacgtcgctatgatccatagagaataagaggacatgttagcgggttgcgctcaaaaaactcttatgtacagaatgcgtccgaaaacgaacctcaaggaaatcgtccatatcgtcctggatgtcaaacggtcgtttgccaagcaattcaaccatgatctctcgagtcaagacttccttctcgagcaacttctttgccacaagttcaacctcggctcgcttctcctccaacaaatctcgtgttcgctgtcgagccttcaacagaagctttcgaacctgtgggatagaaaaagagtaatcagcataagctcggaacaattctttgacaaacacatcagagaagattctaagagattggaaacactcacctcatcatccagtagttcgccggtcttctcactgaatggcttctggaagctctccgagtctcgtcgaccataactgactggtccaacggcctcgctcattccatagttcgagcagatctcaaacgccatctttgtgaccttctgcaaatcatcctgagcaccagtagtgatctttccaaaaaagatctcctcggcaactcgaccaccgagcgtcatactcatcgaatcgagaagctgctcggtcgagtagaggaatctctccttggggagatactgggcgtatccaagtgcacctactcctcgagggatgatagagatcttcaaaagagggtcggcatgctccaagaaccaaccgcaaacagcatggccggcctcgtgataagcgactgtagttttctcctccttgccgagcacccgactttttcgctccaagccaacaatcactcgctcaatcgcgctttcaaagtccttctcttcgatcgcaatcgcgtctcgtcgggcacagtggagagcagcttcgttgcagacgtttgcaatgtctgcaccagaaaatccgggggttaaaagggccaacttctcggcgatcatctcggttgagaggtctttgatcaagacaagaggtcggaggtgaaccatgaagatttgtcgtcggcctccgatatctggtcggtcaatcgcgatatgtcggtcaaatcgaccgggtcgcataagcgccgaatcgaggacgtccgctcggttcgttccggcaaggacaacgatgtgctcgttgccctcgaaaccgtccatctcgactaagagctggttaagtgttgattctcgctcgtcatttccaccaaatgagccggattttcctcgagcctttccgatggcatcgatctcatcaataaagatgatgcagggtgcgttcttcttggcgttctggaacagatcccggactcgggaggaacccactccgacaaacatctcaacgaattcggaaccagaaacagaaaagaagggtacaccagcctcgccggcagtcgccttagcaatcagagtctttcctgttccgggaagtccagagagaatagctcctcgagggatcttggctccaagggcaaggaacttggcgggctgcttgaggaacttgacaaactccatgatttcctatatatgtttttatacgatcggtcggttgtagtcagcatagttgatcgcattgaaacctagtgaatgctggcaacaagagaagaaatgatgaaccaatttagactaacctgcttagcttcatccataccggcaacatccttgaacttgacagcgatatcagtctcgtgactgtaaaagagaaaggacgtcagcttctatttcttagggatcaaatagacacaacgatgacaagagcccactcacttgaacatcttggccttgctctttccgactccaaagatcccacctgggcctccacctccacctccaggcagcgccttccttgtgctccagacaagaactccgacaagcaataaagtaggcgctatgctgaagacccactctccccaactggtttggtccttgtactgaatcgggattcgctcatgactagcgattccaagctcatcctgagcaagctgcatttgtcgttcgaacgcatcaggcgagccgatggtaaagtagtagcttggctgtccggaagcggcaggctgtgtgggagtaaaggccccgttgcctccaccgctccaggagttattgtcgttagcggacggaatggtggcaggagagaacagggtgacgagcactcgagactggttgactacggtgagcttttgaacgagtcccttagcgagtagcgagtttcggctgtggaagtttgatcatcaagaggtcagacagaaacacgcagccaagaagatggtccaagtaagcaactaacaattcctggtaggtgatctctcggtggttggtagaatcaccagagagcagttgataggccatgacagctctgcaacaatggtcaaagaacgtgaggtaaggtgaagttgagtcgaagataagataaagaaactatccgtcagctttgcagttcatttcgtatcctacgaatgggtttcaaaaaacagagacaaggataagagatagaggaggaaggctcacccgactccgatcaggaaaaagttcctgttggacatgtttccgccaccttcgggaaagccaagcttgaacaatggatcctcgctattttctttcttgccatccttgccgtctttatcgtccttgctgtccttgttctttccagacaagtcctgtgcagactcatcggtggacttgcccttattgggagatgtcggcatcgggttggtcgaagatgctcctttctgcttgggctgtccgaagaagccagaaagagggaagggctcctcagagtttgacttcttgggatctttggattccaccgccttatcggcggactctggagtatgcctggcgtaagacgcgatggaggacgagtggaaggccgatcgagagtgaacggaggtcgatgcggcccatcggaatgagggaccggtcaagacggacgctatccttctcgatggctgtactaaacgaagcatgtaaagaaaggaaagtttttatcgaaagcagcaaaggtctaacgccagcagatcaagctgaatgtatatctgtatgggtgtatgtaaggatgattgaatgctggttgatgtgggatgggatgaaaggtggaaagagaaggagaacgctggaacttccgtcagttggccgatcccatcggcaaagcgctttgtaaccatgtggttactgatcgtccatggctacgctgctctcttgaggctttttcttctcaactctttaggaatgtttcgatatgcaaaagacacctggaagaaagcagagtaggatggaaagggagaagagagggaagaaatatcaggcgattgatcggccatcgatgaagaataactatggatgagtctgctgtcttgtgtatggatggtagatctgatgtatgtgaggataatacagaaagctgggcagactgagcattcagttgatcctctgtatcaagcgtaccatacatgtggcatgcgctgtaacaggatcatcaaagaacacagggcggcatgactctctctttcttctctcttcatacacgatatcttcaaacaagcagacaacagtcaaccagcttcttgtagggtactcattcagatagtctactcaactaggcctttaccactagagcccacttggatgatcggtaagtggaggtccgaaccctaacaaacagtttgattacctaatcaagttcaaaagttttttcaccgctttcgtttttatcgcttgcaacttttttttttcttttttttctttttttttttctcgtctagcattccctacatcgggaaagcaccacgccac

SEQ ID NO: 3160 - DNA, 11359 bp, Xanthophyllomyces dendrorhous
actcagctcttcacaccttcacccactcgcataaaggatagcctggtagttggctggtatcccttttctacagatcgactgcatacacatatacacacgcgcatccttaatttgtttttatatcattccgcttggatttactttatcatttgcagttcttgaacaaaaatgctaccggcaactttcgacccatttgctttaaacctcagacagcaggcacacgctctccttacccacctacagatccctgagtctccggctccgcctacatcgactcccttcccgtttcttcctctttcacatctccaggctgttcaccatgtggcctacactccggagcaggtcgtcccggatatgacccctgaggcattcgtcgatgtcctctcggatctactagaacttcagcccttggctgagaaggtcgccgaaatttttagaccgcttctcatggttctcatggccagatggctcgagagagctcgaggaggcagggacgaatgggtcaggaggctcagctcgggcgtcctgatcgcaggctgcatcgaagaggtttggccgtgagtttctacttagttccaccatcgagcgtctctatctatcttgatctgagtaaaacttgacataactttatggccactctttccctttatgacgctcagaataatttctagtttattacaaaccccgacatattcgttatacccacctaccgaagaatcgttgctcctccctcctaaagatctccatcccctactcctcacccatttacgactacttgctcttatcccgtcctccctccttccgaagcatataatctcaacagctacccttcgcgcactattcaccacccctcacccagacttgtcgactcggatgcttgccgttcgagcgttctccattcacaacgggatctcagaatcgaagcgaaaggaatgggaagaatctctcttgcagggcaaagcatttggtcaggacgatatggtttggtatgagggtttggccgtcatcgagggcgttacccaagaggtttggagtgacggttggatctggcctctcgtcgaggctagaaggctggatatgttggagagcgcttggaacaagaacgtccaggagctctacacgccttccaactggacattatcgtcgagctctttgcccaaatgcttggctcttgcggcagaccgggtgcttctcttccgaccggcgcccgcaccatcatcatcatcgtctgcaccgagagtcaatccaaatgtgacagaacaacctcatatacctacaccatcaaccacaaaatccttgttggcgctctcccttcatctatcaaaacgatcccccatcatgctcacttcacctccatcgagtggcaagacccatctgttgacgtacttgtctacgctacatttcccgttccactcaaatccgacgttgactatttctctagctgacacatcgctcgacccaaaatcacttcttggtaactatgtgtcctctccgaccgaccctggaaagttcacatgggtcgaaggtgcccttgctaaggccgtcaaggaaggaaggtgggtcattctggaggacattgacaaagctcgaggggaggtccttgctcttctcggcggattggccgaggagatgagcagagggaccagagcggttggcgacagagggtcacttagaatccctggaagggaggatgtgaggatcggagacggctttgcgctctttgccaccaggacgatcaaaccatttgctgcccctgctaccacctcggacgcagttgacgaaatcgacgtcgccaagccggacgcgaggtttcccaaaccgactttcttaaatgctcaaaagtttgtcgaggtgttcttggaggagccgacgaagcaggagatcgggatgatccttcaagctaggtttcctcgattagaggcaaatcaaattgaccagcttatgtcggcttggagttctgctcagatcggcagatccaccagtggaagcggtattggtagtggaggtgctgcaggcagagaggtaggactaagagacctgatgaagtggtttgtcagagtagaagccctggttactgggtatgttttcttgtctttctccttcttcttcctcttcagaccaagctcttgcggagtccgaggttcttatcacgcatcatctttcttcctatctatagcgcgggatcgacccagatctttggtttggatggatctttcgtcaaccctatcgttcaggaagaggttttcatcgaggcgctcgacgtcttctttggttcgcttccaaagcaaaacgttgctcgagctattgcagtcggagctcagcttgggctcaacgaggaacgagcggagtggtgtatggaaaagcgaatgcctgaagtgagaacgatcggaaacgaagacggtggagaggtcaaggccgttcgatttggtagagttaagttggattgtagaaagtctgccaagggtttgtcctctttgcttgtctcttctcggtgtttctctttcaatattttgacctcgattgaacttgtgtgcgatacttttcgaccgatcagcttaccactctgccgcgaccgagcgaccgtacgctctcacccgaccctcccgacttcttctcgagcaaattggagttgccacctctcacctcgagccctgcctacttgtcggagagactggtacaggaaagaccactgctgtttcctacatatctcacttgcttcgtcgacctctcgtctcgttgaacttgtccactcagacggaatcctctgatctacttggtggattcaagccgctcgatccaaaaattccggccggtgaacttttggtcacttttgcggacctgttttccagaacgtttagtagaaagaagaacaaacgattcgaagaggttgtcaggaaggctgcaggagcaggaaagtggggaagatgtgtggagatgtgggaggaagcaggtagattggctagggaccgtttgaagaagaagcttgaaggtgtagaggaggatgaagaggtcgagtgagttccttatcttcctttgtttttatacatgacgagagtttacgatcatttcaaaagatcggacagagtcttatttgtaccatcttttcgaaaaggtccacaacggctccctctggatctgataccactctcgacgcggttggtcctcgaaagcgacgaaaggtggccctcgagcagcaaaacccagagaccgccaagctcgtgactgagtggaacgcgttctccctcgaggtcgctgattttgagatcagacacgtcaaggccggtggtcgattcgtgttctcgttcgtcgagggacctttagtgaaagcattgaggaacggagactggttcgtcccaccatcaccctgttctttcactgtactgttcgcaagtggtttaacggtcgacttttttctattctatcttctaggctccttctcgatgaagtcaatttggcctccccagaaactttggagagtttggcttgcatcctagagagcccttccgcttcggttgtcctcaccgagcgaggtgatctcgagcccgtggtcagacaccctgatttccgtttgttcgcgtgtatgaaccctgctaccgatgttggaaagaaggatcttcccgccagtctccgatcaagattcaccgagatctatgttccttctcctgatactgaccgacaggccctccgagatattgtcaagcaatatctggacgtcgccgatcgagcggtcatcgaggatgtggctgagctgtatctcagtatcaagactctcgccgattccagacaactggctgatgggtcgaacttcccacctcactactcaatgcgaacacttgccagagctctgacgttcgcttcagagaacgctccggcatacactcttcgacgagcgctctgggaaggatttttaatgtctttcacgatgctgctcgacgccaagagcgcggctattgtgaaggctctgatccagaagcacatccttgaagccgctggaaatccacaggccatcctttctcaagtgcccggattgccttccggaagatccgccgatgatatgtttcggttcggacacttttggctgcagcgaggccctaaggaagccgatgacgcaacggagtatgtgctcaccccatctgtatctgagaagttgatcgacctggccagggtgatttcaacaaacaggttccctgtgctcattcaaggtccaacgtcgagtggaaagacaagtgcggtcgagtacctcgctcgtcggaccggccatcgattcgttcgtatcaacaaccacgaacacacggatattcaggagtatctcggtacatatgtttctgatccggacaccggcaagctcgtcttccaagaaggagttttggtccgtgctgtcagacgaggtgattggatcgttttggacgagctcaacttggcccctacggacgtgctcgaggcgcttaaccgattgcttgatgacaatagagagcttgtcattcccgagacccaagaggtcgtcagacctcatcctcatttcatgctcttcgctacacaaaacccgccagggttgtacggaggaagaaaggtgctttcgagggctttccgaaatagattcctcgaagttcatttcgacgacgttcctcaagccgaattagaaacgatcattcatcaacgatgccggattgcaccttcttatgccaggcgaatcgtctcggtcttccaggaactccagacaagacgacaggccggcagggtgttcgaaacaaagcagtcattcgccactcttcgggatctcttcaggtgggcgatgcgagaggctggagacactcagcagttggctgagcatggttatatgcttctggcggagagggcaagacgtgcggatgacaagttggtcgtcaaagaggttttggagaaagtgttgaaagtctcgattgacgaaaagaagttgtatgatctgtcctgtgagttgctgtcgaggttttataatcatatctattgctttgaactgccagcacaattgtactgaaaacattgctttgtactcctcacagcgtccgatcccgccgagattcagaaacgtttgggctgtcccctacctccactatcaactccctcatctatcgtttggacgagcgctattcagcgcctctatactcttgtggccgctgctatccggaataacgagccggttcttctcgtcggtgaaactggttgtggtaagacctcggtttgtcaattgttagcctcggcactgcaaaaacaactttttgctgtcaattgtcatcaaaatatggagacggccgatcttctaggagggcagaaaccgatccgaaaccgagcaggtcgtcaacatgatgttcttgaagagctcagaagtatactctcccgcatggacgttaccctttctttggaggatacgaccgagtccgaacaggtcatcgttgctgtggagacttacttgagcggtcttcctaagcctcttagtgaggacggaaaacttcttcgagcttctgttgcagagctcaaacgatctactgctctgttcgagtggcacaacggaccccttattgaagctatgactactggcgaccttattctccttgatgaagtttccttagcggacgattcggtgctggaacgattgaacagtgttctcgagccagccaggacgcttgtccttgctgagaaaggtggaagggatattgaacaaatgactattgtggctgctgatggattccaagttcttgcaacaatgaatccaggaggtgattatggaaagaaggaactctccccggcccttagaaatcgattcaccgagatctgggtgccttcattggattcccatgatgacttgatcaagatcgtcgattcatcttgggcggttgaatcactcaaagcatacagtgaatcagtcctgtcctacctccgatggtttaccgctgagttaggagagtctgggtccccagtaatcggagtccgagatatccttgtgcgtccgcccagttttcagtgttgttacatctgctgtgtatacttaatgctaaccggatgaacgattcttcgtggttttatctttccgtaggcttgggtcaactttaccaacattgctgtcaagaacttaaacatctccgagcaagaagctttcgtgagtagttagcttcacaccttccatgttttggtgatatgctgacaatagacttgtcatcttgcttaaccacagcgtcacgctgctcacatgactgtcatcgacgggttggcccttctgccccaaacatcaggcctatcgtccatcgcaatccaaaatcttaagaatgagtgtgtcaaaaagctcgaccagactctcggttcttcttctctcccccaagacttcactgttttggatacgcccgaggtcttttcagttggtggatttggggttcctaagggtcatctcgccgaatctgcttcaagtttcagtcttcgggcacctacaacctgcgctaacgccatgcgagtgttaagaggctgtcaacttcctaaacctattcttcttgagggtagtcctggtgtaggaaaaacgagtttgatcactgctctagcctccgctgcgcagtcccacctttgcaggatcaacttgtccgaccagacagatttggcagatctgtttggatccgatcttcctgttgagggaggtaaacccggagagtttgcctggaaggatgcggctttcctttcggcattgcagtctggacactgggtccttctagacgagatgaacttggcgtcgcaagctgttcttgagggactaaacgctgtgctcgatcaccgaggtaccgtttacatccctgaactcggccgatccttcacccggcaccccgatttccgaatctttgctgctcaaaatcctgtcggtcaaggaggaggtcgaaagggtcttccgaagtccttcctcaataggtttactcgagtctacgtccacgaattgacatccgaagacctgttgctcatcggccagcatatgtaccctgacttctctcctgaacttcttgccaagatgattgagttcaacagccggcttcatcttgagaccatggtgcatcgttcgttcggtcgagatggaagcccttgggaattcaatcttcgtgacgttctccgatggctgtcgctccttcattcaccttcggcgttagacaagcgccctggtcaccctatagaacatctgcagactatatatcttcaccgtttccgacaggagcaagataggatctgcgtgttgaatctgttcgaggaaatcttcgcggaaaccctttcgctcgaaaaccatcctttaccctctaccactccttcgtctgttcagtttggtcacgctctactctcgaggttatccagtacagcagatgcctccaaggacgaaaggctgtcggttcttcaaactcagcttgccccgttagaggccatcagtcgttgtcttgatcttggttggctcatcatcgtttccggaccagctgccagtggcaaatctggtttgatccggttactcgcgcaaatgtctggtcagcgtcttcgggacttcccgatgaactccggagtagacacaatggaacttctgggtagctttgaacaagctgatgcctctcgccgcatggatcgaattcgacatcgattagctaacttgtcaagaaaagcgttagttctcgcagtcttcaatgactctgagtggtcttcgctatctgcggcattggatcacctggatgaagcttctctcactatcgaaggttttgttgtagaggccttggccgtcttgaaaaccctggaagccatgctcggcgatccccattccattctagacgtggtttgggttcgatctgctttgcaggagctttctgcgtctagcagcacttcaggtcgattcgagtgggtcgacggagagcttgtacaagctctttcagcgggagactggctagtgattgacaatgccaatctttgcaacgcatccgtactggatcgaattaactctctctgtgagaccaatggaacgttggttttgagcgagcgtggtacggtcggtggggagcctcagatcttgacgcctcatcccagtttcagattgtttatgaccctcgatcctcggcatggagagctctcgcgagctatgcgtaaccgaggtgtcgagatctgtttggatgccatcacttccccgtatgatctcgcccaaatcactcggcaatctcgacaatccttgacggagccttcggaccttacttcgcttctggctcatcgtgccttagctactttcgacacactgccagccactgtgcctcgacaatcctggtctgcttttgcttctcaagattcatctctggctggaattctacctcaccttcctactccagtactagaatctgaacaggttgcttctttatctctcatcccccaacaagttgctgatcttctgcacttgctatcttcaactgctccatctacttcgaacattgtccgacatgttcttgccttgtatgataaggctctgggactgccattatcaagccacctttccacggctctccagaatgtctttgatcctcagattatcgatttgataactcaagcctcgaaagagaaagtattccttccagaatcattcgtgaggtaccaggtgagtactttaaattcaactcttcttcaactatttgaacttcgtctctctctttttccttcgcttccactcttgtgtaggcgcgttgtgattgtgtagctactaaacaagtgctatacatgactgtttcagcctatcgaccccctttccaactcccatatctctgaagcgagtccccggtcactgttcatcagccaaatgattgaacttgttacgcgcacctcgatctcttcggccagcttcacgtcttcattatctatggccgctaagaagtttgtaaacgatctatcggtcgtggagaagtctttcctcgtcgctcagggccgaaagttacctgttccggtggatcaggtcaccactgcgatctatcctttgattagcgctttctacgctacgattgagcggtcactggctcctattctaactttgcagtcgccggctgatgaagaggtttgttgagtttcccttctctatctgccagtactgtacattgaacatgccctcgattcgtttccttctttcttttcagacaactgctgcgttctctcgatcgttctcacaatttgccgatctagtcgttcaactcatgctatccaccagcgctccagtgcttgattactctgcggtccaggtgcttgtcggttggctactcgagagtgccatccgaattccttcgggtctactcgatcctctagaagcccctcttcagaacttgaaagattcaattaccttcgataccgggcatggtcaacaggaaatctggctagcttacctccgaagaacctcacacaaatccttccgagacttagttcatcgtcttcaagctcttttcgatggtgtcccgacgactcatgacaacttttcgagtaagttcggtcgttgttccgttgacagcttagtccgaactgatcatttcccgtgtcactatctttgtagagcttcgatcgaccgctttgaagctatcagctacatatggacttgatcttatgaataacgatcaagacgactccagcgcactccacgctttggagcaggacatcgaaaaggtgtgaattcagtcttttcgacagacttacatcttagaataatgttcaatttttttgaccttcctctttcttcccttcttttgacaggcgttgatcgaactgcaggacccggaaagctccccaactttgatttcaagatcacgttccggaattttggctaccctcagtcttgatatcctttctagcctactagtctctcagaaaggccaaaacatctcagtatgttatagttacttcttcctctctggattgttcctcactattgggatgactaattcaattctttctatacttgtttaggcggttcttccgtcccttcaagacctcgtccatatggccgagtctgtatcctcgttcccattacaggagacggttccccttcaacacgccctctggaatattcaagctctaggtatgcattcatttctttctattccatgcttccgatcaaagatggctgacgttgaacatcactttcaataggccatatggataacttcactagcaaggatcttcttgagtcttggctaaagactctttggctggaagctgacatcccagaaggcgtaagtttaacatgagtcctacaaaatattttcagatttattgagctttttttccctacgtttaggctcttgctggtcctgcggatctataccgacctactatactttcagctctgttacatgacaagttcgtatattaatccatcagtcatatgtatcaatctgtagtgactaaattcatcttgattttttactctttagggatcaggatactttgaaattgaaagatcttccctcccttgaggtttcttccaaacagctcgcgacggtcttacgtatccgttccaagacccatactcaaagtcatcatgcttcgtccattgatctacttgtccgatctatcttcgatgtaagtattgttgtgaagtgtttctcctatgatagctgccgtatacactactaatcatacacttcattctacctgcaggtctgcgaggcttttgctacttcctacccggagaagctctgggagactttgcagaaagcatccatgccgagcacggccgatgagattgagaatttcgttgcatccctcttatcgacaagccactctcaacttcgagttgctcttcagcagcatgttgttcctaatgttgaatcacttttcagacgcactcaagataattcttccgacatgcaacttcttggtcaagcttgggttggcctctcgattgccactcttcagctctacgtccccgctattcctattgatcccgcagctgctcatggatccgagcttcgacttcttcagtatcaagaaacacagtacgaggcagaactcgtttctcatcgacgtgctgagcttgaagttaccggaaactcttctaacttcaagatcgcttccaagagcgagcttctttggagagtccaacaggctatcgttggactaggggccctccgagtagaccgagaaactaacgtggctttgctgaatacaatgttccacgagattcatcaatttttagcccaagtgattgatggatcgagagtggatgctctgattgccaacattgccagttcgagtgcaggcaaggcagctctggaagaagattctctccaaagcaacattcgtgggttcttacggcgaatggatcagatgtatcatctcttctccgatattactc

SEQ ID NO: 3161 - DNA, 26291 bp, Xanthophyllomyces dendrorhous
atattactcgaccaattggcgttgccttgatgcagcttcgaaccgggttccgcattctcgcccgagacgcagagatgcaatcggctcttcaagcgactcagcttgagtcgactctcgtgactactcttactgctttccccacgtctctcggaatcaagaatcttcgtcgatctgaacttcctattcgcttcaagtctaaattccctgttgttcctacttcaaaacttttactcttggaggtagcctccgttgcgtatgatctttctttgggcatctcgcttgataaccaggttgtaggggctttatttgggctcttcgaccaactctctcatctttggatgatggatcgtgagcgagaattacaggcccaacaagaggctgagagtctttaccgtcagcgcaaggttgatgaggagattctttcagacattgagctggaggagaaggagttcaaagagcttttcccacaatacggagatatcctggatgacgatgaggccatccagcccacttctgccacttcacaaaacaagtctgctttcattcagactgaacaactgaaacaaattggtcgattgcacagtaagtcgcttcttcgaatatatctcatctaccacgcaaggaagtaagcagcaatctgacatgtaaatacaaattactgtattctctagttgccatcttttccaccgctccgaatcaagactgcaatcacatctaccagtctcaaagagacgatgttattaaagacgttttcgacaaagccctcaattcactcgacgattctattgatgatgccctcgcctatcaaatccggtcgttgtgccaagaatcttctaagcgaacctcggttcctaccttccaggagcgaccttacgacttttattcggacgccaacccttacgagatgaacaaggccgtccagctcctcaaccggcttcttgtccgtctggaagatacattgagggagtggcctgatcagatggttctgcatcacctcattgatcgatgcaacgctatcttatctctttccctcggaagtccaattgttcgggtgatagctgccatggagcaacttctccttcataccgccgattgggaatcttttgcaaaccgagaaaactctctcaaacagttccaaaatgagattggaggactcatagtcagctggcgacagcttgagctatcttgttggtctcagcttctcgagactcaggctgtgtcatatgctgaagaagcttcaacctggtggtttaagctctacgaagttcttatccagggaggtaaagccgcttatctcgaagacattcagaatgaaacgtctgttgccgtcgaaaaccatatccgtggaatagtgactctgcttgatcagtacatagcctctagctctcttggccagtactccgccagacttcacctcctgcgctgctttacccggtttatgtcgcttctttcccaatcaactggtaacttccccggactgaaaagaatttcccgaactttggagagcatcactgaacgatttagtcttgccgaaatcaatatctcgtcgtctcttcgaacacagcgggctaagattgagggaagcgtccgagatttcatcaagcttgccagctggaaggacatcaacgttcacgctctcaaagccagtgctcagcatactcatagacaacttcatagaagcattcggaagtttagagaggttcttcgtcaaccctgcgctcctcttttgggagctccagacatgcttccttcttcacaaggaccttctaccatcgcggctgtttcaacttgggcctctgtcgagattggccaagcttcagagctcgcacttccttctcatttgaaaagcaatgcgtcgcatcttgtcaatctatcctctacgttttccaagttccgaggaatctttggaaccactattcgaccagcgttatcttcgaccaagtcggcaaccattgatgaacttacttccgagattctttctactgccaaatctttggccgatgagacccctggagttgccaacgaggagaattctagattaatcaaaaatcttctcactcgaaaacgacgagcttatggagatttgctcaaagaactaagacgaatcggtctttcctctaatctgaggtctgatgtcatgtctcgacaaacgtctatctccactctgcattcgttgccaacactctccaaatctcttgtcgtctcggaggctttgactcaaatgacctgtcgagttgacaattaccatttccgactggtcgtttccatggtttctcttcgagactctttgcgaacccacagtcctgacattactactcgagatcttcagagaggtatcggttttgtggagagtgtgctttctgtagctttggatcaccgtattcggtaagtcatgatcatagaacaccattccctatacattgctaatttgttttattatatattttgtagacttgcttcggctttggaagaagtcaacgagttgaagagctgcgtcggtcgactatctgatatcggtgcttctgactcgtctgaagctatcgcttgtttcgataaagtctctattcccacgctttcttctgactacgacaccatatgtcgaaccatagacgctctacaagagaccttggagagccgaaacgattatggaacaactgtcgctccgacctccaggggaacttcgactgaggttgcatcgagaactcttctgagcgcctgcttgcaacaggccactcgcatcaaagaagttcttggagatgtcttgacgaccgttaaggccactcctttcgcaattttcctcaaaagtacgtgctatcttctctatcaagtgacaatcatggccgttgatcacactctactttgatctgctcagaggatttacacgttattgaatcttgccgagaattcaaacaaaatactgtggacgtgcttaatcagctatccttcgatgaacctcacttccgacaactatacattggaacgctgagcctggtggacatgctctccctccctactccctcatcatttgcaactgctcctcaggctgatgctatcctgcttgagaaaggagacaaacttcttaactccctcttggttgttgctcaagaacttcaaactgtccgcaatgtgatcactgaagaggatgcagatgccgatcggttccttactgaagagtcgtctcttcaaacaaaggcttctcgaactttgcgtctgccagagattcttcaacaactcagagatcttttcacccaaccggccgatctctccacttcctacctcctcgttcagcgtatccgacctttcctcgtcgagtatgctactgcagcagaatgtcatttgaacgctctagcttcatggaccggggctaacttcaagcttactcatgtgctggttcaaatcatctccaacttagctttgaaaggattctgctcccctcctgaagctgaagatgctggtgctggcgagggggattctggtcagactatggagggatctgggatgggtgaaggaacgggtaatgagaatgtcagcgagcagatcgaagatgaaagtcaagttgagggtcttcagggtgaggataacgagccccagccaaaagacaaggagcgcaacgatggtggcgctatcgagatgagcgaggatttcggaggtgagatggaagatgtttcagcagatggttcagacgaagaagacgatgatggttcggacgaggaggaacaaaccccggatgagcaaattggtgatgttgaccctctagacgagaatgcagttgatgagaaactttggggtgatgaaaagggcgaggatgactctaaacaggatgaacacttggatcaagatcggtctactgagcagacacaagtacgttgtctgcacattaccaccgaactttggcaattcgctgacattttaacttctcgccttacagaattccgatttggtcgctaaggatgacgaaaaacctcgtcaagagcctggacaggagaaacctgaaggcgatgctcaagattctgaggatcagtccgaaggagaagaagcccctgaacctgaaatggatggggaagacgaagatggtgcagctgaggacagtcgagacaagggagagaagatgcctgacaatgttcccgaagccgaaacacttgatcttcctgactcactcgatctcggggatgaggaagggggagatgatgaggagactcagcctgagggtatcgatgacgatcccatggacgatatgccggaggatcaaccacctatgccagacgatccttcttctgcccaaaaatcttccactgaagacgaccctgcgcagcctgaaaacgtggacgagggagaagaaactacccttcctgagcctggggctgacgataccgaaatccctgacgaggacgaagatgcgcctcctgaatctgccgaccaggctcaggccgaagctggagaagaagacgcgccggagggcgcggaggaggatcaacaggttgctaagcctaaagttgaagacggcgctgataactcgaatagcgctcaagctcctgatgaacctggagatgaggctggtcaagatgacgctccccaagatcaagaggatggtaccaagaacgatgttggaaagcaagcccagtctacggccgctgatcagatggatgaatccggagacaccgagaacgcgtaagtcaatcagcgttcaaatctcagagttctttaacgttaagcttacatcatacgtatgtatattctacagcgacagctccactcaacctcctccgactgctggcgagtctcaaggcgggcaaggagaggctgttccgcttgacgagagtcaagccaacgaacaagagatgcctcaacgtggcgaagaacctaacccgatgaagaatcttggggacactatgaaggagatccgacgtcgacttgatgaaatcagtgaagcaaaggagaatgagaacgacactaataccgagaataagcctgaagccgaggaggcctctatggaaactggtgagattgaatatgctaaagaagatgatgatgaagacatgcaggccctcggacccgctccagaagatcagacccagaatctgtcagatctgcggatcgccgacgaccaacaagaaagcaccgagatttctcatcaaatggatattgatgaggaggacctgcccaaacccgagcagcctctcgttatcgagcagcctcctgagcttgatcaatcggctgacaaggccctcacggagtccgaagtgcgacaacgtgggcaccaagaccagccgcccttggatattgagcctcgatctcaactggaagaagaggaggatgttgcaccgttgaccgaagaggaagccaaaatgctcgatcagcaagttgagctgatcaacactcagtggctcaactcggaccgatcatctacttccgcggaggagatgtggagattatatacctccctcacacacgatctttcgcactccctttgtgagcagcttcggctgattctggaacccaccctggcaactcgacttaagggtgactatcgatcaggaaagcgactcaacatgaagaagattatcccttatgttgcttccgagttcactaaagacaagatctggctgcgacgaactcgaccaagctcgagagaatatcaagttctgctcgccctcgacgattctcggtcgatggccgaatctcactctgttcatcttgcatacgaaaccctagcactcgtatctcaagcaatgaccaaactcgaggttggtgacatcggaattgcaaagttcggagaggcctttgaacttctacacgggttcgaagagaccaacctatcggacgataagggtgctcaagtgatgtccagattcaagtttgatcagaaagcgacgaatgtactttcccttgtcgagcgtagtcttcaagttctcgctgatgcgagagatcgacgatctaccacgtcttcgacagccgccgacatctggcagctcgagctcatcatctcggatggaatctgtcaggaccatgagaaactccgaactttattgaggaaagcagctgaacagcgagtgatgattgtgttcattattgttgactcgttgcaccgatcgacggcaaacccttttgcgcctgcaggttctgtccctgaacctgcatctcagcagcgaaactcgattctctctatgaagactgccacatacgagactggaccaagcggtcatatggagctcaagatggagagatatttggataccttccccttcgaattctacgtcgtccttagagacgtcgaagcgctcccagaagttctcagcggcacgttgcggcagtggatggagaggtacgtgtctctaagttctatcagagagatgaagcgatcgaatgactaacgcgaacttgaaaattcatgatcaacagagtcagcgaggagtagaaggtgatcctactgtagtaggcagagttttcttcctctttcgaggtttgtcacgttccgtctatttctctaacattcaaacatgaactaatctacttctcccaatatttatagaatgttattttgctccttttttcttccaagcgtttcaaattgatacttttgtcacttcatttatcttctcttatttcccctctcaaactggtattcagttgtagaaccatctgtacttcaatataaaccttcaaacaagattagaaatctcataaggccctcccggacaccatatctggttttctttttcccgtcgtcccattgcttcattaagaatatacaactttcaagcttgacagcgcattgacgtatgttcatgtagatttttcatcagtttcttcaggaaggaaaaagacactaggatcaatagacaattcatgaaccacctaaccaagcggtatcgatttcgatcccagcatagctcttgaactttctaccagcgcgatctccactacgaaaacagaactgagaaccatagatgtcaaactcaagttgaattggtggcattggtgatgttgatgttgatgttgatgctgatgctgatgctggtgacaaagatggcgacggtggtatcggtagaggagacgctgagacagcggaaggagcagattgaagggtgtcgatcacgatagttgctggaggaagggatattcggaacgtgaaaattccgtttcgtttaggaacaactttcacacaacaggggcgtaaagattagattctgaaatctaatggggtcaagaaagaaggaaggaagagaaaaaagaaaggatcaatagcttacctttcaacttgtcttttggggttataattttgaaagtgttttctgtttcgtggattacaatcccttctacgcctaccagatctttgtttgaagataccttgactacaaacggccaaagacaaagggtagaagagcgataatagatcgtaagcctgatatcttatgagaaaaagcactattaatttaaacagcttgacatacctgtaagaaaacatcccgtaaattccgctttagcaatcttgttctgcaatgcctctgcatttccggcccacttccctcccaacccggttttaacatttggcttcgtgcctcccattcctagcagctgaaccatgtactcttcccagacggtccggagccctgtaaacagttcaaatcgacattcccgtggttttggcacccaaacgctcttccttttggcttcttttctgctcaacaaaccaatggtgccagcccggataccgtcctgctttctacgggcctgtcctgcttgtttcttagtagctgcagctgagagacgctgaggattgacaagaggaatcgactttgcatgaagcttggtcgcatatgttgcggccgatgactgtatagaaggaaggaggagactaggcagtgagtcaaatgtaacgggttgagggatcggatcggatggtgctgatgaagtaaagagcaatctgttcgactggatgtgtatagagaccaaccgaaagcaaaggatcagtgcatgccaagttcagacccggaatcgaagatcctaccttagtgtgagccggaagctctctaaacacatcgatctcttttgggggcattctggatagctgaaggaataatagagcagaagaacgaaggtaagaggatggtaaatgagttgaatagtaaagaatcaggcaagtcgaaaatccagacacgcattgggttaaaataaattaacccgcaatacaagcaaaacttttatgtcgcgcttgaaccagatttatagcccatcgcaggttaatatttcgacccgcctttctttccatcgtcttgttcctgacacgtcttggcccatctataacgacggacgaacgaacacgttcaacttcgacttcaccttccctctccctctcttcactctcatacctttcttgcctatcgttgtcatatacataatcttgtttgtcgctgtcggcataatacatcgagatgtcggccccatctagagagagtcattctcgtaggcatggtagcacgtcttctatggcaagttcatccggtggaagaagaccttcagtacgtctctctattcttctttttcatgaagatgatgagcaaactacctactttgtatgattgatctgactccggtctctttgttttactctataattgtcattctatgaatcatgttcgtttaggagaaaactcgtatgttttcttgtaccgagatgggactcgcttgcccttctcaagctcagtttattcgccaacctcgtcctgatcgcttttctttctatctggtttctgttgtatgatttttcgattctaccactttggtgatctgcaactcagacatggagtcaggtaagttgaatttcgcttcgaaagatcagtgctgtaatcggttctccactgatatagaatgtaccgatatagctgttacaaagctgctggtttccactagacagcttctctcagccctaacagattggtcactgggtaaaatcactgaggtcgatgtgggttctacttccacactcctataaactggcgtcatatgattctaagatgttgtcgcgtgtaggtttcggatttttatgttcgtctaggaaatgatttcaacacggccgtttccgccttctctgatctagaaatcaatatgaggtacgggtgacagccttttcataatcccgtttcacttcgttctgttgagctcacgcactgctccttgactttagtgatctactggaagtgccaaaccggttacgaaactgcctcgaacgatgcatcaaccaagacccctctcctcaaaatcttgagcattacctgccagaaattcgacagactattgtctccttactccagggtctcaaagcaaaacaggcgttgtacaaatctcgaaaagatgatgaaaagcgagctagaatagtagcagcagagcgagaacgaacagagtaccttcgacagcaagaacaggaagccaggcaacccatctcacgtgtcgaccctgccgttagagaaacaggacaagatcctgatgaacgagcgctttttaccgaagacaatcgatgggtaccaccaatctcccagaccaatcaacgttatcaggctgcactaccccgtcctcagctttctgggtcttctcgttcccttccgttaccagaggcatcacaacggcctccatctatctccagtagacctacacaaaacccttctttacccagatcgtcatttgatatagcaccgagccaatttcattcccaacaccaacagcatcacgtccctagctcttccacactcaactacgtccctcatgagtcaacatcgagtactagtcgccccatttctcctacatcagcatctgaatctgtttccatccattcgcagagttccagacggccccatatctcatctagacatagagacggacctctcccggcacctcctccagatgcatttaagccaaccagatcaagatcaggtgcttctccttcagacgaaagaaatttcagtgggccgacagaagaaatgataggtcctcctttgagagtttcgaccacgtccctcccacccactcacgcaggtgcaggggaaccaccgagtcgaaataaccgtagttcccatcgaacgtccaactctgctgtcaattcatcaacgatggacccatcacgatcaagatatcagcagccgcctctcgtttcagagaccgatatctctaatacagacacgacatcttccttttccagaccagccttgcgacattcactttctgacccacccgtttcgcctaactttgccacctctttcacagaatctgttcttgtcgaacttccagtgcctccaacgatcaccgcccaatctgactctaccctggatctgccatcctcattttctaacgattcgaccgacaaattgtcaccccttcctatactcgctccggtggttattgagcctcttgcaggtccatctccttccagtcctcctaatgcggtttccatagctgatcaaacattgtccaatttgcgaggatcgggtaatgggatctctcgacgggcaagtcaacgatactcaagttaccagatcaacaaaatcatggatgctggaggattgggagcaatctccaatggagacaatattggtggaaatgagggaacatcgggaggggggcccggtcgatcaaaatcttcccgaagactttcaggaattccagatgagagttccttggagggcaagtcgtccaagcttagtcctgcccgttcgccccgtagcgtacgaataggacctccgcctgttcctgctcttccagaaggaattggagctacccctcgtcgaccactgaacacagaacgattgttcgttccccctgctgaagatactggggtcgaagtccgaatagaggctgacccagatagtgattcacccgtggcaacaataaacggaggatctgttgtcaggtccccatccgcgttcttgtcggctcaaagatcaaaaccaccttccctgatgtcattgtctgaggaagatcagtcgaaagaacaggagtcactgcatgtagcttcatcagatcgacccattggtgaagtggtcaaacctgcgggtgggcgagctcgagagttagcaaccgaagccgtaaatcaggtggaggaagagactgaacaagactcggcagcttctgactctacacggtcgatcacggttttcttagtgtataatagggaatgtaagaaatgcgtggttgaggcaactcctacaatcccggcacttaggttgctctttatggaaaagttttcgtacactgccgagacggaggagtttccagcaatctatattcaggacccaaagaccgaatggaggtacgagtgggaggaaggagacaaactgggtgatggggcaatgctgagtttaaacatcgagcgtaagttctcatctctcttctttcaattggttgatcgagggcctgtatactgatgagcaagactcgaaacgaaactgaattttcaaactatcagcgttggaccaagtgaagcaacatattgacagccagatcagcggtctatctcgaaagttagaggacttgattagagaatctgtcggaccgctctcctcccaatttgccacacttcaagctagcaacctacaatctcaccggttatcggccggactttcattagctaccgccacgcaagcccggtcctcgtcatcgacaaggtcgccctcacagaacataaaatcaggacacgaaggctcgttacctaaggtcattcgaacagcaattctctcagactctgcctctccttccgcgacgatcaaggatcagtccggttcggtcatcaatgccgtcaatatgacctcgtcacaagccagcacatctccaacaattgatctgatatcaaccttggttcaaccgtctatcgctactagccttaccgccttgacagttcctgcagacatccaccaaacactacgagctcagctagacgagattcaagcgttacgtcgagatctcggtgtagccaggcaggtgcatacagatggtatggccgtcatgaaggaaattttcactcgtgttcggaaggagaatcaacggctccgagaagttgcagcatcttcattgaacaccggccgggctttcgtcaacgcaagtaaatccaagattgacatccagtctcaggagacgcttcgtcgaatggaagaccttcaggacgtagttgaagaactttatcaagacgtaacagaacggatggtcgttcctaagccaatggtcatgcgttcattgaaaaaggaccttgagcaggctgaaggtcagctgaaagaactcctttcaacgaccaaggcggcaacgaccacatggcgagcgacatgggccgacgaaatggaaaatgtgatgacggaggaaaaacatctcaaatatcatctcgcgcttacaaacgacattgaggcagactacaacgagtgtaaacgagtgtttgatcagatcacgctttacgccgcccagcgaggggtcggtggttctcatggggggtcaattggtcgctctggcggaagcaactcatacagacagctagggcttccgacggaggatcctcagtcatcgttatcgacagttatgtttcaaattcaaggagctacggtcgatcccgaaaaacggcttcgggcaatcgagaacgcagcccggatgagacaaagggagatggacgggcagaaggaagggaatgagctgacgagtcaactgagtgagttcgttgacggaagaaaacttcgaaaaacaggtggggttgaagagacggaacggttaagacagaaaaagaatgagttggcgctcaagggagtgatagggggaggagtaggtgtcttgaaatcggttccctcattgacaactgtcaaatcggcagagacgacaccggcatcatcgtcatcacctatacctacggtgacagtggagccgagcgaaagcataggctctttatcataagtttcagatttgaccaccaaagaacaaacaccgatagacactagaatccttgacgaaagtcgtactgaggcaggatcaggagattcagcaaaggcaaccgagattaagacattcccgtcttcaaatactgtagatacatcctagtttcctagatctgttctgtccataattctgtctgcttcttgtcttcccggtttgattatctattgtcaatgcggcgagccccaccctcgatacgctgctaccttcttcgccttctcctcgtggtgatttagttgtaaacaaaaaaaaatgtatcaccccttatacatatcttgctaattagtttaataatgcaagatctttatgatgttctgacatgacatacggtgactaacccggacgctaacaaagtcaagagacacaatccatcaacagaccaaaccaaaccaatccttccttcaaccatgtcccagtatgtgcacacctttgtttccttcttgccatcctcgctgctgtaactactcttgctgattgatgccgataaactatcagaagcatcgaaatccctttccaagctccgttcctgcgctggtctccatacgcggacggaccagccacaggcggatggtcacctaacggtctagggtatggcactacacagccgaattcaaccggagcctttcgatggacacagggtgtcggaagcactctagaattacaatttaacggtcagctacatgtgtctttaattccttatgtgactttagtgtgtatttactgtgaaagctgagaggatggcttgggctctttggaatgtatattgtcgatcacaggtacggcggcctatgtatgtgtctcttcctataagaagccaataaactgtatgatgttaaaccgtatcggtcaagagctcaccaaatcttttcttgggatgcctcgcagatttatggctcagtctatggctcgccttcttacactgttacattagacgattcaacgacgtctcctgcggtcgacaacaccgaacttggctcatttactggtttatcagcatcctctgaacatcaattgatcttgaatgtcactgaggccggaacagatgactggttggctctcaacaaggttgttagtgagtccttttctcaaccgatcttcgttgtctgcttgcatatgggacaattgtttctgactggggctattgaacgaatgagaaatgcagtctcagtaccaagaaatggtcaagcaaactatacattcgacgacgcagatacggatcacttctcttactcgtgagtcaaatattatgacaaacccgtccagaaaggggtatatgaagacattgctcatgctgattgtggcgggtatcggcacgtctgtttggagctgctttgtacagaggagtttgggggtaagcagacgtttcttcatgaactcagatgaatcaagacaccgtttattaacgtaacgttcctatcgctgaagagctggggctgcagcctctcaggtaagttttctgaattgataccttttactgaaaacatatatgaaactgagcctgctattgtcttcaatctccatcctatagggaacatacaaacaaactacaacatacacccaggctaagaatgcatacgcgacggttaattttacagggtctagtatctatatgttcgggtacgtcttacgttgttcagtaatctgagaggaagatcaagatataattataagctactgttgacgttgtacctcttgctcttattcgtgatagctctattcagccggatcacggactgtattctgtttcggtagatggacagccggcgacgactttcaacgggagttctcgcgctggtcttacgcaacaacttctcttctttgggtcaggatacgacgcgtccaagacacatatcatcaccgtaacggatgctgatggcagtaagcttgatatggactatattgtcacatgggcagctccagagtaagccgcgtccagttcttctgagatcaaccaatagtcctatacatttctttggtggagttgtcgtttatggaaaaaacacaaagaatactgattgctcgatatcgttcattttggattcaaagtactacacgacaaagacagatagccgggatcagtgtaggagccattgtagcggcgatcatcgtgatcggtgagttcacttgagcataggctcgtttcttctgaagtcaggcgacgctgatgattgattatctatcaggtgttgtcttatggatctggaggacggagagaaagtatgtttgatatacagttgtttttgatagtgtcaacatgtgattgactattttgcatgttacttctctcgggttttatagcggtcgaagaaaactcaatacctatgtaggccgacacttgccatatctttacatgtcttgaaacacaattatggactcactcagattacccttctttgctttgacagattcgggagtatgtggagaaatctcagcaggttcggttgcattaaatctgctacccgatgtccttcaaccctgtacatgtgtcttttgcctgttttattatatgtttggtttgatgtgtcacttcgtttgtgttgatgagggtgtactgtatatcgacaatgcttgaatgaacccacgtttgaaatcttacgttcactgttaaggttaaagaaagttctgcatagatcaaatatgtgtctcggatggaagacaaatgaagttcgacgaagattaccaagctaggtcttgaaaccttgtattgcttttggtcggtgccaccggtctgtaagcggacatttgaacgaaacttacaataagaataggtagagaaagaaagaaaggatgaagaacgacatcaaatggaagattctaagatggtagacaagggggtatgagttggcgagggaagactataagacgagttgacgttttttctaccagatcttcatcgcgctacacggatgaatgtacgaaagaaccaacgctgctctgactgattctctttcagtgagaaaccctagctctagcttatcaaatggttcatgctgatagcagaatcatgactatcgtgcacatgatggataacgcaagatgaagcgtgcatctgcgagactgaattcaatcaagtgaataagttgtgtaatattcctgcttaaccgagttcctacgaattcagttagtcactcgcttaaggttgtcatccctcaacatccattctcacatccatcctccaaggctgtataatcttcaaacggaccatgccagcctccaaacgaggtatagacaaggcgaatctgtcctcagacgagattctcgctaatcagcgagagagaaatcggaaaaaacaagccgctttacgagcgagacgagctcagaagttactcgaccttgaacaggagatcgcccgattgggtgggaaccaccacccttctgcaaccaacgggaccggtgcacactttggatcttctctagtgggaagccagttgatggatggatcttctcagggctcagtacatcttgatgggcagagagaaatcaggaagttgagcgttgtcataggcagattggttggaaagctcaaggagtttggcgtggatgatgaggagatccgatctatgacggaggacggattggaggaagagcttggggaacaaggtatcgtagagaatctgatgcaggctgaggacatcgaacgggatgggaccgaaaaatcagaaagagaagctcaggaaggtacagaacatgaattgatttcctcaattgtttcacatcactcaaggtcccttggttgatccatccattatacccgggaggggaaactttcttgaaatactcccttcgtatttatacagctcaatacgcagactacatccgtttatcaggaggtgacaagacatcatcattatcctctggacagacagtaccctatccgactaactggccatccccacctcgagtcgacccaaatggccattcagatcctcccgcttctaccacctcctctggtgaccctctaggaccctaccctgtatcccagccttcttctggcacctctgtagccggaggtacgaatatgatcggaattgacggactcctcacagattcttcgtcgaacggaatccaggctagaaagccatcgtcagacaatctaataggaaatccatcgcccaatactccgcctggctctgcttttccttttgctttcgtacgttcaacgggatcccttatttcttggcattctacttgtctcttttggtcttagatggctgtggattcatggttgatccttttctttccttttctttccttactaatcatgcgcaatcgcgtcttttgtttgtaccggatgtgaaatcctccatccagctcttctccggtccaggtccagcgggatcgatactccctcaacacgagcttcaacaacaacaatcattcatacgctcattgagtaccgatggtggtctatcgtccgaaatgatatctcgagaacctggtcaagacatgcctgtagaaggtgaaggcgagtcgacaggggaaggcataggtgcaggagtggaacaagctgagggtgaggaagttagggatgagactcagggtgcaggaggagaagccgacggggtcagtacgaacgaagggtttctagtggagggacaaatgccgtccccagaatcagggcacatgcctcctccggagtcggtggatgttgaaccagttcgtcttactttcgtctgttgatccctgtgttcctgaatatacgcgacttgtcgtgtataatattgatagacctgacccggactttaattgcaatcttttcattcgtttgttaaacgcctgatcgcgttattgtttgacattctcttcttcttcagacatacgatcatcccgaataaaccagggatcaggaagattttttctttctttctttcttatctttttcttctttgggtttgtactagagacatgtacaatggcgacttttaacagaacaattaatatggcttgctcgtggttcttgtacaaacacgacgcttatcgatgaagagtggagtacaacacatgtattatgaagcctttcacaagtgacaaagctgggaaaaccagagtacaaaagaataaaattgcaggacagaaagatattacaacgagagatgctagcatgaaacaaagaaaaatgagcccaagaagtacaagaacgtctacaacgggtatcggaaaccggcttggatctgagcagccgttgggccgtgggttccagtgtcctctccgttttcgagcctgacgttttgtttagagagatagattcgagtggcaacagcgaacaagatggcgaccacagcggcggccaagttgacacagaaagcgctgaggtatcgtggaccggatgtgtagaggtaagaggtgaacacattaggagtattggaaacagtattgatcaaggcgaggacgagagctcgcttgatgcttggtccgttggtggaaccagagatccaagaaagagtaacgatactggaactgtagaatgaagcgggcatcatcatcatggccacatatcgggcagcggtgttgagggttgagacagcgatgatgttcgccaacatggtcaacatcagcgggcacacgatgtgaaggaatcgctcttgggtcttatcagagtgccatccgttgatcatgatgcagaccacacaaagcaggtagggaggagcggtcagacagtaggtgatgtttcgagagtatttgagggttgcgaccacactggggaagaaattggtgacagcggcggcgacataggtcgagaacaagatacccataagcaaccaggtcttggggtcggacacggtcatcttgaaagcctgaagggtggaaaattcttccgagttgtccttctgtcctcggtcgacctggagagtgtactcgaggaaatccttttcggtgtccgaataccatcgagcagatcgaatggtgtctgtttagtagcagcagaatgatcacaaaaagattcgagccgatcaaagcatgagaggatattgtcaataatttagtacacatattgtagaaggagtgatgaagaggatagccttactaggaaggatgagggcacagcaaagggcacatccgacggtcgccacaccctcaacgatgctgattgatttgaacaaacaccaactgttagtcagtatatttgcatcacacaaagcgaagatcgacaatagtcatagtgaaaatgagcgaaacatacaagagccattgccagccctcgattccgtgcttgccactcagtttgagaatagcaatgcacagcaaaccaccgaaagcgtttccaagttgagagccagagtacaggatggctgttcgcaaagccatctgcttcttggtgtagcagcaactgaggtagaagatagcaccggggaagaaggcagcttcggtgactccaaggaggactcggcaggcaagaagctggtcgtagctcttaactacaccagtgcatccagaaacgactccccaaagagcgcaagcaagacagatgtagttattggacgttgaaggcacaaatgtgtcaaccagagtaagagacagtcgacagattaaccggcaagaacagatagactcactaggcaggcttcttgattcgaccgatgaccatgttactgggaacctggaaagcgatatctatatgtatgttacagaaatttcgtgagctcaagatcgtgtttcttgacgaacgaaaagagaacgagcgtacatcctgcgaagagaacactgatgacggtcgagtattgttgtgccgagagctgtataaagttgtagggataaatcagattcagggttcatcagcgcaaaccgagatgatcggaaagaagcgggacctacatgaagatcggtgctaatcccagcgagtttcgcactagatcgggtaattttcaaacgaaattgatatcgtgagcagtcggcatgaatatgcatacgcgggaaacgaaccggagacctacctggccatgttttgacgatcaaggtagttaaggatgtatagcaagagcatgacctaaggatcgagcggagtagaattgtttgtcaaagtgctttcatcaagatagataccagaaaagacgggaaagggtacgaacaggcatgaccgaaaggtcgagcttcctggtcgccttcttctggagggcaatcaattcttcctcggacaagttctcgatacttgccggcttctggatcttgtgcgggtcgaaggcttcgtccttccagttctcggtgtgaacggcttcggccttcatgtcctcatcgaacgagtcgacgcgagctaagtcgtgtttggtgtccatgatggtagtgagtggtggtggtggtggatgttgggtataactgggcggaaacgagaactagttgttgggtattgatggagattcggtgtagaaggccagattggtgagggagaagaagaaacacagggacaggatgaagattgatctctctcgtccttttatgttgttgccttccatcggtctcaagacacctgcacacaaattaaggatcccgaaggtgaattttctggtgaggacgaccaacaccagacaggtgaagctcggccataccagaaccgcgaaatctaccggtcggcccgagttcagagatgttagtggctgaagtcagcgaaggcaaaagacggctatcggtctctcgacacaaacatactcggtggattgactgcgcagtaggttttaggcacgtgatcgatgcaccccaagctatagtagcccgctcatctatgcgtgccttgtttcccaatccgttggcctgccggctcatgcagggccgtcgggtggtaacattagacacttcttcaagctgtcattgccgtatttaattcgatcaaggctaacggcggctgtacaaggattgaggttggccctttggatgtaagtcccaagtgttccgaggatcgatgtccgcagataggctttgtcccaagacaaagagatcgccaacacatacgctgttttcctgagtgattattctgagggacccaaggaaaagaaaagatcagacaatacacgataaagtgcagtacgttgtatgcctgatttccaacttgaaaaagaagaaaagagagaaaaaaattacttccggccacctcggtgagatctttaggaccgacgagtcgtcgccgaccatatgtaatttatcaacgaaaccgtgtatcagatccatggccgaggcttgactagatgcatattaagtcgatcgactcgtcaacgtgttgcacagactccctagagacccggataagagagcttgataggtcaaccagacaagcaagtcggtaacgaacgttcaacagttttgtttcgggtccagctcatcgactggcgcacacaaagcagaaccgtctcagccggtgtccttatcaagataatcttctgcgcgcatcgattgtttgaccaggtgctatcaatctcaggtgaagactgagtaggcgaagctagccgatgacgacttcgatgacgacgaagaacggatcacccaaaatgaccaggaccacaggtcaggtctacttcgtagagaacgagtagtccaccataccacctttaagccgaggtagagccaaatacctgacatgtatcaatcaaatagtattgtcaaatagtagaagaatctctcttcgtcgttttggaaccatgtatcacaatagcatagtacactatcttgaatccaacgatcgattcagcatcgcggaagagaaacatgctatcaggagaaggtcaaacttggtcacaatattcacccacgacagaaacgagacacaagcttggggtaaagattggctccctgtcaactttccatctcatcagagacgtcgagcagatctcgagtcacaactttgagacaatgagaatttagcgcctttagagcaaggcaaaatcgatcctagacgacaataacaacgcaggagaaagttggggttggggtcaagaggcagcgacaaagtaccgagttagtatcatctctttgcacgatcgagtgtcggaagtaatttctcccaaccctggtctccactattctggccgacattgtgttacgcatggatccaagaataggcgtgcggattggaccatgttctcccactttgtcgaggtggaaaacacgtatagtatgccaatgggagcagctgtatatttcgtttcaagattcccaaccgtccaagaggacgctacataacctcgaatggaacaagatcaagtagacatacccgaaagaagctgttaacaggagtgtgaatagaccattccaaggatttggttgatagcaataggtggcatcaaattatgaagtacgtcagtgcgatgaacaagcgagatctacacgacgcagctgatcatgcagccaaagtgagtagaggactagatgacacctattaagaggttgaatagggtgtttcgtccttgcacacgccccgctcagtccagatgataggtaaccgtactttcaatgtcagcagtctgtcgggaacgatctcattcctgatcaacgatatttctcgccatctccatctggcctctgcagaccctctatttggtttgatttttatactttatatcccggataccgcgatggtttcaacaaaacggccactacgctctctccccccagattacttccttccccttcaagccggtttcttcgaaatacgttcggcgtatttacaaatctttctttacccgctcggcctcccgttgagccttctcatccatcaatcgctgctccctctcctcggtcttccgagcgtactcctgtccggcctgcataccgatggtaccgatgaggcactatcaacgttgagagcagagacgaaaacaaaagaggaaagaataaagttgtaagatgacatgaccgtgcatataggagtgacatgaatgacgcgcgtaggtgaagagaaaagacacagagtgggagtgaacatgcaatgtatatcgcgtcgtcctcggcagcttttgcggacaaagaagaacgcggcacgataaatgaggatatatacgcacgatagccaccaaagcgtttccagcggccaaaactcggacggcatcggctctatctccagcactaggaggaacctcgggaacgacagccggagggaggaatgaccacgttccggctggagcgggaggcgaaggggggacttagatcgcaagggatgcaaaaaagaaagggatgtcgttggtcgataaaagaagagaagatagaaggaagaaatcaagcgcaacgataagtaatcacggattgcaaataagtagattgatagctgtactcacggaaagttcgaagggaaggaatgtggactgtcaagtagaggataagggttgcgacttgtaggactagttggttgaatatgatcgcacgaaagagtgggtagtgtgagcaattggtcgaatcagaaacgctttgaatgttcacatacccaaggcacttccatcgaagaagatggcgctctccgtccaggcgttcaacttgagaattaacgccaacacaggcgagacggcgagaacatgtagaagtgctttgacaccaacaggggcatcccaccaggtctggtaatagacgtaagctttctcgatggaagcctcagtgagctgagaatagagcagatcataatcgacctttgaaaagagtgtgtatttgattggacgagcgataagatgtaagtctgacttttcatcactgggaaagttgagtaggagagaaaaggatggacgagtaactcacaatctggttgacaagaacaactccaaggaggaatgccgagcacgtgtagacgacggaagacagaaaggcgggcatgctgggtcgtgaggatgatggttggtgtccttttttcctcctttcccatgcaaacttttggcaagaatgggtcgaacaagcccaagaggttaaacaggttcatgaggcggctaaatatcacgtggcgttcagaagctgtgctcgcacatgtccgaagcaaccttgccttctctctgccatccgtcatcacaacaaacagtgaatagacatccatcctcgttcaattctctactatggatcgcgcgcaaaccactccattccctacacgacctcgtctcaacctgcctcttccatctgtgctttctcagcggacacctgatgagcttcgtcgactggaaggcgtctggcgagcattacgacagaccgagctatcggcgagacctacgactgtttggaaaggcaaacagaaagaattccgtccgtacgatgggccgaacgagtctgaatctgaggtaaacgcaaggactttgtatgaaggaaaagagaatgaatggaccccagacgtggtcagacaaggtgttcgattaacgaggagacagacttcttggcctgagaggaaggtctctaggtcaacgatcatgaccggttcctcgacttctctcgccggtcatagttccgtccaaggatctagagtggaccgcagtggtcaaaggtacccttctgcagcgtcaatcgtcagttcgtctcgtccatctcggcatgtgtcatatctggatgagtttcagtcgcgtccgccatcatcgctgtacccaatttcaagagtaccctcggtgtatccttcagggcctactgttgccagttctgaaagatacgcgtccgatcccactcgaaaatcatcccactcaagcagtcgatcaggaaaacaccagggctctccttctcttcctccgctgccatcgccagctctttctccttctacctcctcacctcggcagccctcttcatgtacaaaatcccacaatgccgaattaaaatcggatcagaagccaaagcttcaaaaccttccattacgacaaagaaataacgatcgatcaccaaatcgaagtcaattaaaaacacgatccgagtctgccgcacatctctttcaagcgcatcccatgaggactaaccgatacgatcgaccctgtccaaccacctcatcgacgatatcctccgagcttgacgtttcaattcaaccgatatacgaccagcatcctgctctcaatccattgagtacggttcatcttccggggaaagagcaagggctgaaacatggattcgtcagaatcgtccaagcgggtcggagcgaagccgagggagagagtagagtagaactctggctgagaggtgagatgtgggtgttgactggggatggacttcaggtgagttttctttcttgcagcaaatgtgtgtctttttgtgcgcgattttgctaagacattggctgagcggacatttatctagttgagcttttggagcgcatcctctctgattttgcccacctcggttgaagagtcagcccaagaagtccaataccttcctctccctgacgtcacgtgggatgctccgttcgagaagaaattggttcacgcccggccaggcgggtcgaccagtaaacatcgaaagcgactacggttcctcgagaaatggattaccgcggagagagaacgaacggtgtttgtacgtcctatcttccgatatgctggtgtggatgtgttgcgtgagcgtttgcgcgaatcgaatgaagggacaacctgctgaccgaacgatatttcatccgatgcacaactcggcatcaacgatgacgacgataaaacatgaagtctaagcttacactcccccctccagaatatccacctcacacatcactgactatctactcgaacccacctcacccatctctcaagctatacgttcgatttccatcttcttctcgccgttcatcgtaccgcactgaatcccgatcctctgcaggcgcatgcgccggaactaggattgaagaactttcgatccatcttgatttttcttcggaaacactatcgatcgaacgtcggtccaaaggactgtatgttcataaacgggtactcgtctccgaaacggaaacgaccggctcgttggtcggtcctgagattgaagggtgggagttgatgaggtctgtcgttcggcaaaagattggcgaggctgtttggaagggtgttttgaatcgatgagggaaggcaatctttggtcttatctttctcatttctcatcttgacaggaattgaaatttgtgagcatatggagggaggaaacagagatgatttgccaagagtgaaagaagtttttccttagtaaacataatctatagaatccacagaggtttggaaagatatcaagacctaaaagtgggaaggtacgaagaagaacgaaaaaacgaagtaacgaaaaaagcaatgaagaggaagaaataacgaaaaatagtccgtgcttttacaagagaaggagagagagatacgaaagaaacaatacacctttgttaagaaaaagactgcaacaaaaccacatagaccgttgacattaaggcaaggaaagag

SEQ ID NO: 3162 - DNA, 10381 bp, Xanthophyllomyces dendrorhous
  misc_feature (4122)..(4131): n is a, c, g, or t
gttgaaagggctgaagagggaaaaatttgaagaatcgaatgaagattgagtaaggagaaacactcatcgcgcgataagccacacaatgaaccgaaataatattctttaaaaaaaagtaaggaaaaataacttgagaaaaccgtatcgatgtaaaaaaaactcttgaaagagagaagaggaaagctagaaaaaatagcctttaaaaacatgcaggttgcaaaaaaggagaaggttatggctaactcagatctggcaagtccgtttttggaggttgtgtcttttctggcgaacccttgatccggtgctccatcgagctcgtcagtccacccatcggtgtcttttcctccatgagaccaaactcccactcgccctctcgttccgcaccctttggggatagcccaaggccgctgagtgaccacggccacggccctgtgcccgttcctgatccgaggccctgtccgagggtggctcccgatccggcgctgatggggtacatggaagacattccgcccgagggtgtgaacggagggaatcctgttggtggaccaccccacagaccacccgatatggaatgaccataggccgagatgggggatggacctgggatatgcaagctcgtcgcgtcgttcgtctgtgagcggagagaagcgtgttccgtttgggatcgatccggatcggcgttgttggccgggatgagagggggaggggcaccgagaaatgacgtctgaaggtgaggtaggcttgtcagccgagctttcgacatggactgagtgtcagatagagtaggcgaggtcacctggacggtgagcttgtcgttgacagagtctgccgatggaggggggagaggaacgagaggtgtgtgccgaggggacaaagacgatacgtttggagaagaacgtccggtcgggtcagacattacgctagcgcgggaaatgcttgttcgagcgggcgagtatggaagccaaccatctgagtttctcttcgtcataggggctgaggctacgttggaagattcttgtccttctgctagtttctctgactgtggtctcagatggggagggaataggtgagtcgggacggatggtcggccagtggcaaagacatttggataagactctgcctgcgagtagaacgggggttgtgcttgatatggattgtatgggtagtgatagggagcggagttatacagagagtgagactggatgaagttagacgaaaaggaaaagagaatgtatacgtgtggatatagattggttagattgggtattttctttgtattcacaatggactaaactggcatactgacagacagatgagagcttccctggggattgaacggaatatgatttgggaacatttggttcaagaaagtagattcttggccaacccgagatcctggatggaagactttggacgggatgccctcttctgggacggtcgttgtcggttgaggttgctgagtggcggattccttcatgacccaacccgacgagacggctggtattgggactgatgacgaggctgatggatgggaatctagttgaacgtcagatgaagaccaaccggcagcgtggtcgcattctgattctgctgtggatgtcttggttgagtgtgagtcaggaggtgtattgagagtgccctgggtattcacaaaaacggtggccatgatggaacggagccggttgatctccccttcaagtagccggatcaccgtgcgttgctcgcgatcccgtctgagaagcacgagaaggcagatgagtagagcgagtaagagaatgaataagcagatgagcatagtaatcagagatggttaaccggagaaacaaaagaagaactggattacctctcggcttctctgatcattccttcgtaagcaactctctgagactctgaggcagcgagcagagcagagtttgtggagagttcgaactgaagctgggagaccagccgatcactaaagtctttctgtgccttcaggtcggtcagctcggacacctgagattctaacgtggacaagtggagtgcccgacgctctctaaagaaagagatgaaaggtcggttagagaaaaaaggtgggaggggaggaatcagagggaggacggggagagtaaaaggaggaagttgaagataccggtgagccctctgcttaagcctgtttctcgtcttgaggctgagtttccttttaggaaccccgctgtattctgtcaaatctatcccttccccgtccgatacagcgacgtctgggtcgtcatcttccaatccgccgtcgtcgtcgtcatctttcgaatccgtgctgttctttggacgtttcgagcctttggccttagtgggaggtgcggggtgtttcgaaagatgatgagcaggatgactaggatgggatgctgatggttgttgagagagtgagagtgagagctggaaggcagaaaatggaatgtcctggtcgacgtgttctggcttgacagccggcatggcgaccgacttgatgcctggaggaagtgatgaacgggatgaacctggcgaccagtttgaagaacaggaggaagaggaagaagacattgagccaggttgactccaccgaggatatgactggtcgtttgtcaggaccgaaggaaaattgttggccggaaaacgatctgcagtcgcggaccttgctggttcttctacttcttgctgctgtgtgattgccatccagggggatcgactgcaaaagatgaaagaagaaagccaataggattatagaaaggagacagaaggggagagagaagattagtcaagacgatgacaacgttgagagtttaagaagatattgttcgttctttctttctttttttttccttttgcttcttcctttagcggaccggcggcggatttgaggaaggacggacagagaaggatgcagagggttgaggggagagagacagagagaagcccgagcagagctgtagaatgtggcaggggaagtatagggtgaggatcagacggtcggtagagacacggaaagtatacagtagaaacagagagagagaagtagagatagaacacagcactcacacacacacaaacacacacgcacacgcaccgaaaatgaagaaggtaggaattccaacgggcacactctgaaggcgacacgacccgttaaacagaaccgaatgaaagggtgagaagatgactagagtacggatcgctctcggttcgggcatgaaagatattttggccggcaagagagcgggcggtgacaaacttcgggaggtcggcctcgcttgtagatggaaataaatgccaagagctcgagatgcggcgagaaaaggagagatagcgggttagagcgagaatcagggcaagacagaaatttgatcgctcttgatcaccacagacacaacccacgcggtcgaacggcgctctacgtcatctcggcctgatccatcccgggtcggagatcgactgccgagattccattacctcttgttcctgatttaccttgttcctaatcgggctgccctcgtcttcttcctcctcgtcctcgtctctttttccctcgtctctgtcatcctgaccgaccagactttgctccgccttccgaccgattctcagtccctctcttccacagcctttttaatcgtcttttttactcttgtttaacaatggcttggaaatgttcggccagttccaatgccgatgtaagtaatgagcgataaacagtcgattgcccgccgtctctttgttacacatattcgccctgaccgtacctggcatacacacatggaagctcgtggcgaatctgtggtcacatcgcttggtgcttaccccacaagtcgcaaaggcgatgaccgctgtggacagagcgtgttacatcccatttcggctagatccatatgaagattctcctcagtgagtatccgcgcatcaaccctcaccgatgcctatgttgtgctcttgctcaaacgcgttcgactagacctattgggttctctgctagtatgttcattgtatctcggctatctgatggccgtcaacgagagccagcttctcgctcacctgtctgcctattcacatgcagctatctctgctcctcatatgcaagtcttagccttttttttcgtctttttttttctttttttttcnnnnnnnnnntttttctatctttcaacagtttgtcaatagaaaccgttcacttaaatagggattttttcttcttctttccaattatcattattctcatctccgcttgacatttgcacccgtccttggtccatgttgcctcttccttctctctaggcatgtaagtctttctcaagactttcactatctaaacgttcagatctagcttgatctaacgctccgtcctatcgccccgcggacatgaaaggcgtatgcactcgaaaacacattccccttcatcaagccaaactcaaaaatactcgacgttggctctggatctggctacttatgcgccgtctttcatgagattcttctccaggcagcaggtggtgacaaacgacatccactctccaaagtcgtcggcgtagatcatctctcccgttggttttcctctatgattcatttctctctttcctaaagcccctttcttttcgtgttgtttcaaagtcatcttttcttgtttttcttggatcaactttttttttcttcttgttcttactcatgcctcccttctgctcaattgtcatcggtaagaactcgcgttactctcaaaagggaatctccaacgggacggttatgcgtctctcctcgaacaaggatctatacagattgaatgtgctgacggaagacagggtgagtgatgggctcacttgattgtttgtttgtttttcttgccaagtctcttcttttctatcggacgcgcatctcgtgtactgatcagtatgagtctgaaatctcaccgtcttctctcctcaggctggcctgcagaaggtgagcgtcagattcgagagcggaaacagagtcattaagaggaaaatcaaaacaaattctccttctggctgagattactcatttccccggatttgcaaaatctgattgaaccaaaaccaccctgacatgttgctcttccgcgccccttcttttgaaccatgttcgaagctcctttcgatgtgatccatgtcggagcagccgctgcctcaatgccacaagctctggtcgatcaagtaagttagttgaccccaaccctctaatcccaaaccttcaacccttgacctgttcgcttgcctaacgacccttgttttcgtcacgttttatttctgacaaataaccaatcgatcctgacggaaagctcgcttgtcctggtcgcatgttcattcctgtagggacgaccacccaacgtacgtctccctgcggtttttttccttgctgatcgctttctctctgcgcgatcaatgcgaattccgatctttcctgcttgctcctctttctttttctcttttctttttttttcttttcttttttaatatagaaatttatgaggtcacaaaatcagagactggacaagtaacgattaccaaactcagtcagttctcattctctttctttctgtccgttctttgcctgacctcttttgattttctcttctctttccttaacttactttcgccctttttctcctcttcccttaaaccttcttggactttccgccatgttacaatgacaaaaaaattatagtgggcgttcaagtaagttgtctctcgtgtaccgatcaaaacaccgatacaccccgtccggggctatcgcattcgtctttcagtctaaaaaagagggaaatcgtcaattgagatatttataaaccgatccacgaatttgtaaagtacatcccgctttgtgatgccaccgtccaatggaccgaagacgataatctttagggaatcgttctattcgtcgttttccttttcttttctttttttctctctctctcttttcctttggattctctagtccaccatatgcatttttagttctcctctctcggcaagcccactgatcacccagattcaatgtggcctgggttcaatcccgcaagtaacaaaagcataaccagatagagagattttctagatgttttcaatagcaaagaaagaggaaggaaagtaaggaaagtagaaacacggatgaccggagaccttgggaacccttaaagacaaaggaaaagatgatggaaaaagaaaagggaaaaaaaagagaaaacagaagagtgaacacctaggtctggtttcgtctctttcccctttctccttaacataagagagatatgaagaaaatgttcagagatttatataagagatttgggtggaatgagtgaatagagaaggggtgaactgtgaaaaagagtgctccctatacgcgcacacacacacacacacacacgcaaaaaacacaagcacaccaagagagaattctagtgatctttgatcagaccaagcactgaatttcatcagagttcacacacaacgacagacaagaaagagaaatccagggtcagaaacttgtactgctcgatgttcggattcaaatacttcatcttggaaagatcctcaccttaaggtctccgtcaagcatggcgagtcccgctcccaacgcccaaccgagctcgactcctctgagctgctttccaacgatgatatctcgatcggactcaatctcgtatccgagacccaacaacgcatgcatgaacgtcaaatccaagcagtactcgctcctttcctccaactctgccaacgctcccttgtttcctgcaaacttcttttgccagacggcctcggacgagcaagccgtctgggccagctgcttgacgtacccaagatcgaacgctttggtctcggcctcgtcgggggcgaagagcggtcggattcgatcatagaagtaggagagcgcgaggaaagaccccttggggaaggtgtcgagtagagaaggctggtacaccccgttgaaagagcatggcttgacctcacaaatcctattgttgtccgttcgtttgggtcagttgatggtgccaaaagccaaaggagatccgtgtctctcacggacatagaaaaaaacacttacgcgtcctttgccatgaccaactcaacgactcgcttgcaagattcataccctccagagccaccgaccatagtgacgttgactggcgacctgcccggaggatccaacgtaaccttcttgcttcttccggctcccaaacaagggctaacgatcttagtggattccgacatgtcctcccacaacgtatcctccttgccgaacgagtaggtgaaagcgacgaggttgtgcacgctccgtcgggctcgcatgagaccgtagccgaggtacgagtgctggtacagagtgaacgtttggccaccaaacatgagctcgtacttgtggtccccctcggcaaaggcagactcattcttgaacgttggttcaaacacaatctgggtggatgctccaccgaggtccatcaccgccagagtatccgtggcatctgatccctcgccgatcttcccgagcaagtaattcgcagtgatccaagcgtagacacctaaagaaaatgtgtttgaagttgagtcgattagtgggatgagaaagaaagagagtgggaaatgagaaaaccaaccttcatcttttccgtccatgatgacgaccggatcagttgggatcagcgggaatgggaagtctgacttgagatggtgctcaacctcggccaagatcgcgttgctctgcttcgctcccaataatcgaagtccagcagtcgccttgacggccaaaggcgaacatttttgcagactctccggcacaaccctgagagcttcgtcgatcaaagggttcaaactgccagctgcttcggttggagaatctttaaatgacgaaagtcctggttgaatagacttgaatgtctcgtactccaacatgggcgaagcgttgcagtagttgaacttgtatacgtggattcgggaaccagtcgagccagcgtcaatcatgagagcgtactggacgagcttcttgcctttgaaagcctttttgcaatacgtggtgcctaacggatccggatcggtctcgaatgaggtcgggcctttaggaacagcaacttcgtaagaggtagactcctttttgggagcatcaacctcgggcgtttccaccgttggctttgaaggtttcgtcggcttgttcgcgccagcctttggaggaatcaacggatgcttctcatgaacaccctcgccttccttctgagcggaaggttcgtcttcctcgtcttcaaagtcaatattgctaatcggcttggtggagctggaaccgcctttgaccggtttgtgtgggtaagacacatcctctttagaggcgggccaagaaccctctagctcgggtctagtgactgtaaaaggaggtttggaatgcgaagataagaaccggaaccaggaagatgaagaaaaaggataacttgtaggccctcgtgcagaagaaggcttgacgacaagaaaccttggacgaaccttcgtcatattgaagctcatccgaggtagatccggtcaatactcgtcctctgccactggcgacgaataacaacaatgcgatggcaacaccacccaacacggcatacttcttccaactagctccacccgccctccttcctcctgacccagatcgaggtccacctcgaccacccgtttcggcgtcgtaccggtttacgggtgtatatcgtctgttactgcctccgaacatgggactagcgactgccgaggatgatgcccttcggtgtttgatagagcttgaggaaagtggggatgaaggagaacgagtgtatgcttcagagtgagagagtgagacagagggaaggtctgtatggttgttttgggagaaaagagaaggaccaagaaaagaggcgagcccgacagatagataataaaaagagagagagatcccgagatgaattagcttccaaaagctaaaatatgaaataaacagatctatccatttccaagttacatacgctgagtatcaactgaaaatccgggccgtagggcagaaggcagattcgacagagacagtgtgggagaagacagcttgattatggctcaagaaagaagagaaggagacagagcccagaaggaaaaagaaacagaaagtgatagggtcgcttgaacaaaccgaaggaagtgtttgtcagaggaaggagtggcaaagaatgcaaacctggaaggcatgcacacttagataagccgggctgcgcgcacagaccgttcgggacgtttgaccttccatctctttccaagaattctttcaacactgtgtctggataaagcaagaaaccggtggaatgtacggctacaaaggcatattataatcggtgaacagattgaaaccccatcttgttttttttttctttcgattagaaggaaataaaggaaaccaaaagctatgcttgcgaagagtaacatcaagtaaagaacacacaacgaaagaatatagaaaggagagtacaaaatacgcggtctctctagacttggatcagatagaaaccggaggaatagatagacaactctggtgaaccaggttaagcgccttgatcgagtcacactggttgatgacacaactgatgttgatctcagaggctccctgagagatcatctcaatgttgattccaccctcggcgagtgtagtgaacattcgacccgagattcctaccatgttttgtagacgaccgacgagcgaaaggatggccatgtctcgctggacggtgatggaaccgatcttcttgagctccttgacaaccctgtcggtatctcgcttggtaagctctggaatagccatggagacatggacctcactcgtactgatgagatcgacaatgactccgaaccgatcgagcgttccaaagattctcgcaaggaacccgtgtgagatcgttttcctattcgagtgaatgttgatgatgacgatgctgtccttgatggtgaccgccgtgggaagatgttgcggccaccgtttgacaggaacggctggaaagactctttctgattcagagccgtcttgggcggctggagtatcagattgagggtagatcaccgaccctccacccgtcgggttctcaacgtttttgattcggataggaatagaggcccggatgacctgctccatggtaaagggatggataacttcggaaccgtagtatgtcaactcggccgcttcatctggggtaatgatggggatcaatcgggcggtcggcactttccgaggatcggcggaaaagataccatcgacctccttccaaacctgaagctcgcttgcattgagaccgacggcgcatagcgcagcacacagatcagtgtatcctcgaccaacctgcttgagaagagatccaggcacgcatccaaagtaacctgtgaggagtgtaaaggag

SEQ ID NO: 3163 - DNA, 7444 bp, Xanthophyllomyces dendrorhous
aataaatgttaaatcgcttatcagcggacagttcctgatagattgtgtcatcgtgtatgcaatgcaggctaagtattaactttgcaaagtctgttgaaatgctaccccgccatgctcgctaatgttctaccgagtcatgcactgtaatgaattctgtttccaacaggcaaacactcaacactcgaagactctcatctctcctcgctctcgctctcgctctccgtctctgtatccctgaacccctcgtgttatctcttgtgtcgtctctttctctcttttatcatttcgctattcgacaatgtcttcagagttcgatgatgtcctcctcaataatagtatagtaatcgataacgttggtttggtgtttctctctctacctgactcaaacagtgcctttcaattgcttacccttggctcttgctcgcttgtcccgccctttcaaccgcctgactcgaaccccttcacacatcacctcacagggcacaggcagcatcaaagctggttttgcaggtcaaagtcatcctaaatgtttctttccgacctggtatgaattccttctcttcaagcctcatcatccgttccaggtattgttgtaactgagatatcacccacaaccgtattcaaatataaagtgttggcagaccgaaacaccctagggtcatggcaggtgccatctctggagatacgttcatcggaaagaaaacacaagagctcagagggcttttgaaactaaactggccgatggagggcggggtcgtaagtgttatgtctctctgttttatgcatcaattccttagactctaaaatctgtcaacactggcaggctccaatcatcagacacacaaacttactgatccaattaaaacacaggtcaaggactgggaagatatggaacgtatttggaaatgggtgtattctgaggaactaggtactttatccgaggaggtatgtcatcgatacgcgtctacctatgatccttccccgatgatgacttgatgccaaccagagcgaaacctttgctttctccttatagcacccggtactattgacagaagctccgctcaatcctcgccaaaatcgagacattgctgctcagatctttttcgaaaccttcaatgtccctgctttattcacatctgttcaagctgtcctcgccttgtgagtcctttcgtttttctcatggtgtatccttccctttacttttacaagttcatcgtgcgcagaaaggatagacgttgactctgtttcaactctcatcttttccataaaccttggcgactttctcagatattcatcaggccgtacaacaggtatcgttttagattcaggtgatggagtcacacacgctgtgcccgtctacgaggggttctctatgccccatgctattagacggattgacatagccggaaggtattgttaccaatctttctctctctcgcattctatctttctggtctcggtgaaggatgctggcctgctgactctattgcttgttatctcatacagggatgtaacgaatcaacttcagcttcttctacgaaaatctggatcaaacctatctacctcggctgagctggagaccgtacggacgatcaaagagaaatgttgttatatcgcgctcaacccgtccaaggaggataaagagcttctattagctgctagctcagctggaggaaagagtggaaaggtgaatgatggaagaaaaaaagcaggggaggatttcatcttaccagatggaagaaagattcaagtgcgtccgctcatgattttcttcagccgtatacagagctatatttgccaaccaatcgtttgctgttgatcaaatagcttggatccgaacggttccgcgcaccggagattttgttcaacccagaactcgtcggtcaagaattcgttggagttcaccaactcttagtagactcgatcagtagaacagataccgacctgagacgaagtctgttctcaaacatcgtacttagcggaggaaccactctatgcagaggttcgtgtggcttcgtcaccctatctgtgagagacaagctcagaacacgaatagatgaactgatccgtatgggagccttgaactttatctcgtttgcggaatcaggattcggagacagattattaacagaagtcaaaaagatcgcgcttaaagacatcaagatcaagatttacgcacctcctgagcgaaaggtacggcttgttattgatgtactagcatacaggaatagcaaatcgtttgcgaagacggtcaagagatactgattgactcgttttcctgtttgactatccatggaacagtactcgacatggatcggaggatctatcttggccaacctcgcgacctttagaaaagtaagttgattggcgttcagtcctgccgtacgttttgctaatctgacagatcttgttctttctctcgctgtctttagatgtgggtgtcagcagaagagtaccaagaagatccggatatcattcacaagaaaaacttttaggcaatctttcccgtctacatccttctcttgatttcgccctgtcttcgccgttctcattcagagcattttgaacgcttccgtagatgtgtatctcctctctctctctgctcccgcatcccgctctttttccgtccatccctctcctggtttgaaacgtctccgtcaaccaggttgtttgcttacgcgctctgctcttctcaaaactcttgctcgtcatataccctcccttgctgctcgactccatgttatgtttcctttaaagacgatagatctgatagattacaacctatcatgtgtataaatacatatacgttccaaaatctggaagtgtttgatcgaaccgatcttggaaaattgggatagagggcaagatctctatcgctgaacaatggttgtatgcgacgcagaattagctacgctggatacggctcgaacaagatatacacaacagcgtacctcttgttggctctaggagggattttacccatctttcttgacaactgattacgtacccttggttctgatatgtttccggggaatagagaacgtgatatataatcgggaggagagagagagagggagccagcgcaggtttgagtctgatgttctcctttcttttttgtgctctattttctgaatctccgccagacttttccgaggggaaggataaatatgcgcgcaaatgatggactgagatagaaagatgctgcgatcctgacgggagcgagtgcctgtaattgtaaaatggtgagcttctctttgctcatactaaaccatcgaaggagcagagacgaaggacaaagcacgaaccttgacgacagcataagcagccacgccattgaccatatcaccagcaactccatccagtcctcctggcgtgctcgacttgggatctcgactatccagaatgctctgcgcaacgggagtcgtccgatctcgcttctcgaaccctaggataccatacctttcaccaactttgacaaccttggttcttccctgttcgatccactcatccactgtccctatatattcttccccagaagttgattcacccagtcggctcctcacgtcgtgctcaagatctctaagagatgaaacgacggcaggtcctcctccgaaagaccggaatgcatagaacaggccgacgacagggactaaagcggtgatctcgtgaagaaccccaaaagagatcaggagagaaggcaatggtatctgaggatggaggagatgtatctttttgagagcaggaaatcgatcgagcagcttggattgtagaggagaaccaggagtcgacatccttattggtcaacgagtcgaggaatgatagacagaagaagttgagttgaaagaacgacctcaaaagcatgctgatgtttcaatttaaccctaacatttggtgacgcgatcagcctgtggtcgatactctcgttcatcggtccaatcgatccatctgttcatcaccagccatgtctaacaacgattctcgtccattgccagagggtatgtccaaatacatttgctcggcattagactaagagaatagtgactgatcggtttgttaaactcccttcccttccaaataatccttatcaatcaaacccaggatgggtcgcccagtacgtatgatactcgctcttccgattcaagctgagagtcaagattgttctgagatatctggttcaacagatttgattccaactacaacgctccattctgggtcgacactcggaaggtttgtgaatgtttatgctcttattcttgtgaaatcagtttatataggctcattcttaagaaactgcttttctacagacgccacccgaggtgagactgctccccaagacgcttaactatatacatgaagccgttgtcatctaacctcttcctcatctcacctcttgaacaaaaacataacgtactagtcatcttgggctcagtaagttcttctccatttgaatgtcttgcccctagactataatcttattgagcattctccttaatagcccgctagatatcaatcctcctgcccagccatacgcaccaccggtcggaccgcctccatctcaatcttactcgtcgccacagtatcagtctgaaaagccaaaccagtatgattcgacccgaagcaactacccctctcaacagaatagctatcagcccaacggaggaggatacccagtctcccaacctggctatcaaatccagccgcctcctcagcaaccatactatcaggagcctcagaagaagaagggattctttagttcactaatgggaggtggatcaaggccacaacagcagccaatgatgtatggacagcaacagaatcaaccctattaccaacaatcgccttacggaaattctggtcggatgggaggaggaagaatgggtaagtccgctcttgtgtgtctgcttcatacgacgtatgcttccagaatggctcatgccttcatatctcaatcatttccctgatactatcaggtggaggaggtggaatgggaatgggaggtatggctttggcgtgagtgttcatcgctttatcttggcaagtcgggagctgccaagcgcatgactttgctaactgaccactgatgttttctaacatttaccctcacgtagtggaggagctggtcttatgggaggaatgctactggccgatgcaatcgacgaccgggaagatgtacgtttcttcttgcctctatactgttgcctataagtgtctatgtaactcatcatatcctgcactgtttttctttacaaccctctctccttcaggaggcctacgaccagggctacgatgacgggggaggaggtgatgacggaggtgatttctagacgcatatcactcgctcttccacaaagagcgttctcatttgctttctgatatactgtacgatgatgttcttgaagattttcttgcaaggtttctgggctcttgtttctttctacacatatattgtcatctcccattgcttggcataatcgccaagtatactgcaagatcaaaagctgtgttgcacgtgatccgttatcgtcctgattcattcaaaccgataaaccaaccattacgcgtacaatttcattcgatccagttcgattcagttcaattcattcaacactcgaccatgtttcgtgaatttctatcactccttgtcctcgcgatgttcgttggtgcgaccgagcaagacttcctgtcagcacaaaccatcaacttgggctgcccgtcgatgacgatccgatgcgtcaaggatggaaaatggccatccgggattgtaggtgatatcgggaagaaagaattttgtttctctggtttccgatgtaaccaatgcgagtaagtgatcctgcttggatgcttggcctgcgggaacgcttctcgcagaaccatgattgtaatcttgtttaatcaatcgtttggattgtgctggttcgaattcatagggaacaagcaaacacggacgaatgcaacttgacattcccgatcgagtgcgaggaggcctgccaggctttcgcgccaattcccttttgaatcatgacttgtcatttgtagcttctatctttccatctgaaatgccatccatataagaaaagaagaaggaaagagagcatttgctattgaagattaaccgaaactccaagttagacatcgagtgactaaccctatatgtcagaaatctcccgctcaacttgccagacaatattgtagattctcacatcatctacctgttcttcactttctcctctttcaagtcgatactacgatgctagccagaaagacaatccttaaccaactcgctcagcgatctgccgttcgattctacagctcggcacccacgtcagctatcagggatctcttgaaggatgaattcaagaaggctatgaaagccaaaaacatgaatgatatcaatatcgtcaaggtatgtcctttaaatctgacgtatcgctttcctcggaatgtgcttggaaaaagcagtccaagaagagactcgttcttatactgccttgcctagatacaactaacgaacgatttcgtattctcctctttccctctgcacatggctcacggcgtttttatcgactcggaaaccctacttttctttcaatgaaaccctgggatcaaaagagcatcatggctgacatcacgtaccacgagaaatccttctcgcctccaaagccggcggatgacgagtctgtgtatgccgtcattcaaaaagctatcaaccgacgagtccgttcccttttctcttcccaatcatttctccttccctctctttttcctggccttgtctgcgagaagggtcggcgaatctgatcctattcaatccctcctttgttatccggatgggatgaaacgggtgaacagaaagagtcagcagctcagttccaaagcggaaacaggactgatctagctgacaaggagacgctcgaggcagagtttatccagaagttcttgcctgcggccctctcgaacgatgaggtattgtcttttctctttaatcctactccttgggctttgtcgcgtactgttgacacttaataagcgaataaggttcactgacggtttttttcgatgggcaaaaacaaatgaaacccgtatcaacagatcaaggtcattctcgaacgacttcttaaagaactagcagtaccccaaggagacatcaaatccgtcggaaagctcttgaaagcgttctggtcagagatcgctcggtcgaaagcggatggaacattggttgccaagatcgcgaaggaactcttgggtacaaagtaaaacaaattggcaagagagaaaagaagtagaagtagaataagaaggaaaagaagaaaaggatatacatgtcttggttatatagtaccctaaagagaaatcgcctcaagtacaccaaagtgtcatcccttgtcttatcttgtcatctctttgctaggcaggcggatagaaccctgcccagagaacgatagag

SEQ ID NO: 3164 - DNA, 27289 bp, Xanthophyllomyces dendrorhous
gtttctatcacgcctaccaatcgagcgctgtcggcccgagacgagcgctgccgctccccaccagaccacagggtttgtctgtgctagacgaagaatgatctggacgtgagatgtgaagaatagaatggcagaccagacgattgaatgaatcacatatggcatgatccaacgttcttggattattgagcttggccgattgagcgcgagaaacacacttctaggcatgaaaggtatgggaaggactaatgaagggaggctcgagaagtgggtatagacaaggagtatataaatcggggctgaaaggagaaagttgggaatctgagggagtgtaaagtagcggaggaagcctacattcctgtttgttgcccgtattcatgataagctgatcaatcacaacaaagatctaagagggtagatgaagagagtgagcggcaacagagggacaaacgaaccagtacttctcctgaacataggtgtacaccacgggcattcggcgggcacaccactccggggttaaattgagagaagggacgtccaaacagaattgttggtatagttgaatctgggaaaaaacaaaaggagcaaagaccgctggtgcagagagcgcaaacagacatgctaagaggaatctctggaaatcaacgaagtaacgttgcgacggcacaagaaaaagaaacagatatgagcataaccggatgcaaggatcaatagagaaaataaagaaaagaacacaccttcctccacgttactggctgtatatagagagggcggacgatgagctcccagccgaggtagccaacattcatgacacctaacggtctaacagcggtagcgcccgcgaaacaacctacggcaaccaatcctttcacggcttccttccaacgtatactgtctactgctgctctttgcatggccagagaagcgtgggaaggagcgagaaggagcataccggagaaggagaggagagcatacatgggctcggtatagggtgagatagacggaccaggggaaggcgagaggatgtataacatccaagttaatttagcgaactgcctagaggccgtcagacgaagcgtcaacctattgagcgcatgagcagaaagagaaagacaatggaagaaaggtcaacaaatcgagaggaagtagcaaagatacggacgaggaatagacccacaggtaaagaacgagaccggctaaaatcccggccgtccatgaacagatgacgccggctgtgacgacatgatgaatctcaacttggccttgtagaggttttgttcctgagagccaaccaagaagtttcccaccaacacgcatgacccatatccagccccatccaaaagcagtctcctgctcgacggcataataacctcgacgagcgacgggaatgaaccagaggacatcccacctaagaaaggagtgcagattggaggatgccgagagtaagagatcgggcgatcgatcaaagagtggaagacagcatgaagatatatagaggagggcaagggtggcgagccggaaagctaacgagcacgcaaggaacggagcgacatcatcaaggcgtgtggacatgaggctcgactcatggagagtgagcgactgaagatgaaggatgaaagatgaaaaaagctgaaggcgcccaaaaagattagatattctggtatcagccaaggtctcgctactgaccataaactggatgactgataactctttcaaattctgtaacaatttagttgtgcatgtgttttcgttttcttctttcgattttctttctcgttttctctctctaattattgcaattggacgtccagatgcgaagacagaagaatcgaggaaaacctcatggatagagaatcgagacaggaaacaaaaaaatgtttactacagagaaaaacggaaaggaatgaagaacaaaggtcaatttggaacgactcagaaaaaacgaagcgaccgaggcaaacttaccctggcgacgataccgtcgaatcgggacttgaaccaggagataacgtcctcaggcttgaccttgtgctgggcaccgattcgggccttctgctgctttcgctcggcgactcgcataccgggtcggcccatgacgacgtagaagtccattccgaaaataccgattccgggatcgtacttgataccgagatcgatgtgctcctggataccgaaaccgaagtttccggtggcggagaagttcctcttcctcaactcgtactccttgaccttgagtcctcgctcgaggatctcctcggccttagggcctcggatggtgacgtggcaagcgatcttttcgtttcgtcggataccgaaggttcggacggtgtatcgagccttggaggtgacgggggtctgaccagtcaactgctcgagaaccttggaggctcgggtaagtcgatcaccagactctccgacggagatgtctatagtgattatacaaatgtaaccgattagtctggcgcacgagaagaaaacaacctaagaaatacctactgagaacgagcttctggatcttgagctccttcatggagttggtagcggtcttggtctcggcctgaggcgaagagagcataggatggggaggaccaatcagtatgaccgaactgaccaaggctctaagtccttgtcgcctttttttgctattctagaaatgcggatgtttccatccacattgtttattactacacaccattttgctggaaagaaagaagaaagtaggaacaagcagacgttagtctacatatacgttgtaaatcatccagacaaagctaacacttgtacgtacagaggattcctaggagttcttgaagggaagggactggagaaaagagaaaaaaaaagaaacgagcagagaaaaacttgacgacgagcttgaccaggcgaacagagcacaagcgtgacgagtaatatttaaactccgggcacgtgatttacttgctgggtaactcgccgcttcttctccggtgatttatcgagcgcataatctccatctgctgaacttgtgtcctatggggtctatctgcgttgctcattctcttcctcacagagtaaatgaggtaaaagtacaactggtctagatccgaatcaagagtgcgctctcaaacaagccagatgccagggatctaactgggtggctaacattttatgctagtgtatacaaccctgattgtatgtgttccttacctttccgctttcgatatctgtatgcactcgtttcgtcttacttccatgttcgagcgaaaagaagatacgagtgctttatcgcttccagtttttccatagttcattttttccctcctctctcttttctctcgagttttgattctgtcatcttcgttcaaagcacccttcgtcctatgtacaatcatgtctatgcatatatcagtagcatttccatagtcagtcgagagcctgagcctatgaaattatcctaacaacttgacaaccggagtcaaccaaaccaaacacaaggatgcttaatctccgtttcagtccaaacatagtggttgccgtgcccttctgcccttacactaggcaaaagggtgatttccagcgatcgtaaccaagtcgtcgtaaccattggaacgtagctcatatttctgaccctgattagataagctaacggatgtaaaagaatctaggccctagctatgacgtgccaagaaacatttaacgggagccgagaaagagaaagagaaagaaacaaagagccggatgaaggatgatggacgggtgttgatgaggagaagagccaaatgctgtagatgatgttggtcctgaagaaaagaacatgccaggtcaacagagagataacagagagcgcattgaaaggaaggcccatgagggaatggtaggtgagagggaacggcgaaagagcgaaagattaagccatcctcactttatttcagcgcagtatacaacttgtacccaagagaaagcggagccatcaagccaaccaagaccaacgaggttttctccttctatccacatcccgaacatccttcgctcttcgttctctcttgtcttgatatacacagatacattcacatactcacacacccgcactcgtacttactcacccgttcgctcagtccccctttgaccagctgtctgcctcggctgactactcggtagcccgtccattcgcccgttcgctcgcttgtttgattccttcttttttccgccttgacgatgcgccatccaatctattctctacttgctctcggctcgatctctgtggtctcggcgatcgatcctctgtctgatactgtcctagacagagttatctctctcgccatttctagtagtatctacaggtctgtcccgatttctttcttgttcccgatttttctctctcggtttcttctacctgggctgaatgtttattcgtcattctttcttcgcctcattcgttattgttgccatgtgcgaccagctgggaaaatggtacactcgccagggcacttacagagtactatgttccgtccatatcgccctttactgaaaacttcctcacaaacgatcccaatccgtccaactcgactattacctcccaacttatcctcatcgcccagtccacattagcccataagcaagcctcgttcggacagtcttccacctctggtaactggactctctctgctggtaaatctttgagtcttctggacgacgattcggcagccgatccggccagcctaggagaggtcgtctcttggtacaatcaaactcagtctgacacccaagcctatggggtcgcccttgaacaagaggcacgtttcctctctctcgcacatttagacttcacctatcctccctctcactctcttctcgcttgactgactagatccattcgttctttcctctctgtatctcaggtagcgtacctgttgcaagtcgttcccagatccagtacgggcgcaatcagtcaccgcgccgatcagtttcaatattggagcgatttcgcttacatggtccctccttttgtatgctttccttgtttcctatctctctcttctgcttgtctcttcaatacctcttgacaacctttctttttctcttatctcccagttggcatacatgggcgcactcgagaataaccagaccctcgtaacggaggcttataaccagctcggtttgtacagaggcgtgtgtccgatgctttgtgtttgaatcgtttaatcctttttttcttctacctctcttcttactgaattgccataatcttacttcacaggccctcaagcaatcaaacggactctggaaacgtacgtctcgagcgctatcagaaagatacagcgccttttttgctcatcttaacaccccaacggtttcttccgcttcctctttcttttctcgatcggtagatattcagcaggggtcaggatcaatcgacaacggcgcatggacaaccggtaatggttgggcggccgctggtatgctcagagtcatagctagtgagttgactgttttgctcttctcaatctcttctactcgaaaaccatcagaaattgtcgctcaacggtggatattgggcggtcccttggttgaaatcagtcatccagaacagtgggatggcaaattcgttcactaatcagatcgcagatctaaaatcatggatcagtgagattcttacgggagcttatgcccacgaggttcgtctgttcttcttacactcctctcttttcctccttgatacgcttccctcggatgattgaacaccgccactctccatctatcctcaacatctacagctcacaactggtctgttacataactatgctgacaactcgagtacattcatcgactccaccggagcgatcatcctcgcatccgtggcgtaccgtttatctgccatgggaatcacctccgtctgggttccgttcgccgagcggacgtatgcaaacgtatccgctggggtggccagttccgatggctgggttgcgccggtagtgaattcgttggactggagtaaacagggacaaacttcgccggaagcacagagcttcgtcatcttgatggagacaggaaggagagcctgggtgagcgcaggaagtacgaacgcatcaggtagtgctggaacaggggaaaatcccaaccagtcaacggcgacaagggggatgttcgttcctgcgctctctgtatcacggggactactatttgggttgatctttgtcatcctttcggctatctagggctttacgtacaatacgatggatcggatctcggaagtttatctatagactatctcatctctacattgaatgattgcgcatcaagatatttatcttttctttctggtatcttcttctctctgcttctatcggtatatgcacttgacgtacgcttctgcctcctggtcctttcttgcttgagaccgtacaggtctacttttcaataaattcacgaccaatcttgtcataacctgctcattttgttatagcgcatactctctctctcttgaagaggggttcagcctccgtatttactcaaacggctttgtttgtactcgtttctgttcatcttatgacggtcttgttctcttgttcatccggatgatatattagatcgctcttatcgtctatactcagcttctattcgtttttttttctttctaccatgaggttttgttttactgtcttgacacggtgatgcgcttcctttcttctcttatcagatcgagaaagatctcgaatctgcttatttgtttcaatatctttctttcttgtgcgagccaagaccagacaagacgatgcagttgaaaggtgtaaagacatgtgaatccgggtcaagagtgctcgtgatgtgcgtaagaaaaaggaaagaaggttaagctacataggacgcctttaaatttgaatgagaaaaagaaagtctagtttttatttgagaaaaagaaggaagaatcataaaagacccggaaagtagtatcgatgaattatttcgtatttaactagagttggcgttcgaggtaagctcggcctgtgtgaggagagctcggggggcgtcatctcggggcatcatgacctcgatcaagttcaagacgtttcctgactggaactccttgttgttcaacaaggcatcgagctcatctcgagtggcgaccttgtggaacttgtgcttgagagcctgtccctccttgggaggtccagcgaagaggtcgaggatgagcgagtggttgtagggctggatgtcgttgtagacagccttgacaccgtggatctgtcgctcaatttcgtatccgtcgttgttgaggacaaagatgtagggagaaagtcctcgtcggagcatggtaccaatctcctggatcgtcaactgaagggatccatctccaacgaagaggatcgttcgtcggtcaggctgggccgactctcgagcggcagcggcggctcccaaggtggctccaacagaccatccgatagctccccaaaggacctgggcgagggcgacggcgttcttagggtagggaatatcaagaacaccgaaggcagaggtaccggtctcagcgatcacgacatcgtactcctggaggaactttccgagtcggggccagaggtgcttctgggtgatggtagtcttgccaaacctcttgtcgtcctcgctatcgtcggtggtgttgggcacctcgacggcctccttcctctgctcagcagcctcaccctcagccttgttggcagcgtcagatcccttcttggcagggaactgtccaagcttctcgatcaagtgtgggagcacgtctcggaaagagattccagggtaggtagcgtatccgatcttgacgtggtcagagtgaagctcgacgactcggctggagtccaaagagtaggagaacgatccggtgttgaagtcactgagcaaagcacccatggagaggacgagatcggccttctcgacgagctgtcgaacggagggaagggagttggctccgatgtagcatcctccgtagttagggtgggtctcatccatagtggccttacccatgggagtctcgtagaaggtcatgtcggtcttctcaacaagctcctgaacggcgcgctccattccgaatcgggaagcacaggcgtcgacgaggacgatgggatcgacactgtccttgtacatctggacgaccttgttgaggacatcctcgacagccggggtggtcttgatcgtgtccagaggggggcagacgaagggagcggagagaggagtgggctgtgaaggcaatgtcatatttgattagtttgaaatcgtcgcgattacatgtagacagtgagcaaaggtttgacttacgagctcagtgttgagagccgcggaggagatcttgacgtggaagagatcggtggggaaggtcaagtaaacaggtcggcactctcgaagggcaaccttgatgagatcgtcgatgatctgaccggcgttctcggctcgagtaagcttgccggtgtgagcagagatcttggcgctcatgtcctcgaactcgttgaatcctccgtcaccaagggtgtctattcaaagagaagtttaagatgtgagatagaattcgatcgggtaacatgttagagatgaaacgtacggtgaagaagagccttctgggactggagcttgttgttgggaactccgacaatatggagaaggggaagtcgctcggacatcctgtgaatggaagaagaggtcagtcaactgttgacaatagcgcgatgtggcaagagggaacgcacattccggcgactccacagagagcactgagctctccgacaccgaaggtggtgacgaggacggcaagtcccttggagactcgagcgtaaccatcggcggcgtaagaggcgttcaactcattggcgtttccggcctgtatgaggagacatatgaagagaaaaccccatatggtaagcaaagagatgcaggaaaaaagaaagagggtaagggaaagagagaactcacccaggtgaaatcgggggaagcctcgatgtagtcgaggaactcgaggttgaaatctccggggacaccgaagatggtcttgaccttgagctggttgagtctggttgtcggcaaaagatgggaagcaagggaacagagcaagagagaaaaggggaaaggaacaccgatgagctttaaggcacaaggaacgaatgagaggaacgatgacgtaccgggcgagcaagtactcggagatggagatctgatcagggtaggcggcaggcatatctgaacgaggaagctaaagcggttagagtggtagagatgagttggtggatgatagagtagaagtgattgtcgtctgtttgtatgagatgaaggagaggaagggaaagtggatgatgttagcagacttgggtgtcttatatatctctttttttctatcttctttttcttgccgccccgatgggagaaggatattcttccgattgggagaagaacttgaaacttcagacgctgcagagcggaaacaatcagaaggcccgggaaagagtgcggccgtggggagatcttgttctgtctgccactcacagacagcgcacggtgacgtggtatggtccgttcgggtttccgcacccacccggccaaatggggcctccactcggcagcggacggcgcacagcagatcaggcactatggtacgcggagagtcggggaccgaacgtcacgtgattagcacacgaagcttcaggaacaaacttccgacgatcatcttccatttaaccctacggtggcgaatattccggaagaagaccgaccatctcttgcattcagcctatttcttttttccctttcttctctgtttcttcctttcgccagttctctttgcctaattgcgatgctcaatatcgagtttatttcttgtgcgcataaccctacatactattcttatcactcgaacaaaagaccgttcatatgtcataatatacaaatcatccgaccgagaaggacaacttagtcgaaagcaaaacccaagagaaaatgctgatgtatgccaaaaacgaaacacgttaacaacctggagatacgttggcctcggaaggctgtctctaaagcagacaaggcatggaaacaggagaagagacttgccttgtacaacgacattatcttggccacgctgtcgattggaggaagatgaggaccaagagaggaagtttcgttaatgcaacagtcaaggaagatcgatcctgtctctcgtctagtcgatacatatgaagaaatacacttgcaatgcctcaagatgatagatttttttgctccctgcacgcattcgaagctcctgagagagagagaagggttcccgagagaacaagtgaattattcgacacgcactcaatcagtcttgttgtcctttcaaacctcgctttgaagaagacacacttacataaaacgcagcccagtgaatgatctcgggctttagactctcatccactctctcgaccatccgttcagtcatcgtctttaaagcaaaaataaaataaaatgagagaagggatacatgttaatcagagtgaccagatgagtatcacgcaagcagccaaacagacagaggaaacgtgccttcagaacgagcacaggcggaatgcagtgactcaaaagctcatacaacctggatcgaacctcgagcaaccgttccggatcttgtttctccaatatggagtccgccacctttgcacagtacacctcccaatccggtttggccgtctctagagacggtgaacttagatcaggcctgtccatcatgaaaatttcactccaaaaatggttagcatttcttggtgagttctgtctcatgcaaagagagagagagagaaagaagtaaatacacgcacgactgcatctttaaagcttcaaacacaagaatcgccttcctcaagtttccgtcactctcatcgataattttctgagcaaccgacgaaggtaaatgaaacttttccttctttgccacatgattcaacactgtcgtcatctgttcgtacaagcagttaggccactgttcatcactcatgtacgccacgcatccagatcagcgaaaagaggagaaagaagaaaccaacctcttcctcagaaggtgctcccacacgaacgagcagacatctactacggattggaccgatgatctgactggtcgattccgcgcatagaattattcttaggttgcccatgtacttttccatcgtccgacgaagtgccgcctgtgcatccctgctcagcgaatcggcagagttgatgatgaccactgtagtcaaagagccagaatttgaatactagagttttgtcgacgaagagcaagaacaaaaaagatactgccgtacccttaaacttctgttttgcattcagatctacctgctgagtctgagcgatctccttaagaatatcagagatcaccacccggtcgtactgtccaacatctctgcgaagttcgttcgttcgttagttcattttcagtttagaatcgagagtgaaaagaaagacgtcgttggacagaaacatagaagataacataatgaatatcaaaaggagacacaagaaagacctacgacggagtcaactcgatatgatagttggattgaacgacattgacgtctagttttctcttcgaaggcgtgatgaacactcgctgatcgatcttcaactgtgatccctcagcacataatgagtttaggagaaccatcagagagtaggtcgaaagtaagttgagggttcagacaaagtacacttctcactgtcacccgacagagggcaaaacaatggttaaagaaaaaaaaggaacgaaatggaaagaaagcaagaaaacgatgacttgctttttcgacacccgatccaaacagctctctaagaacacacataattcgggtttttttccctgctccggaaggcccatagaacagtatgtgcggaaagtcactcgatccagccagggaagacagccgatcagacagagcagaatgatagtgaagatcggccagctgccgtggtcggtatttatccacccagagactcattgatgattaagaatatagatctatttgaacaagtgagctattgaaagagtgatgagctggatagaacgggtgtgagcgggctggggagactagttctgttaagatggttgtcgtttttcgagtgaaaaggaagttgattgaccatccgagctcgtttgttcgctcatttacgatgacgcgtcaagaacgcgacgcgtctttactcttcactaacacacacacacagaggcgagatatataaaggacattctaaaaaacgagttcaaggtataaacatatataaccactcgatgtatgatcaagcagcagcaacagtggctgtagggactgtcatcgttgagaccggtaatgccaatgacgcgttacccgacatcgccttttcctcctccataaagctttttagatcgtcaggatctagtcgacttctcctaccatcgtctggttttctaaaccctccaaagaagccttcgatcgttacaggttcttcctctctctgttgttcccgccgctgtccgctgcgctcccctttgtcgtcattgccaatgtcgacatcgtctctgagacccttttcttcttctccttcttccccctcactctcagctaccaaatctcttaggaagccctccagcccaacgtctcctaagctcgctcttaatcttcctcggtcgttcactaattcacccgtcaaaagatcaatctcatcgtcctcttccatcggaatccctttgtacttgttgacaatttcctcccagctgtcaagtaaacggagtgaagcgttgtaccgtttcgaagccagatcctcgtccgtcaacgcctgctcacgaggtgtatttgatgaagaaggatcagatccaagagaagaatcaccccatcgcgatcgtcgacgtttgtaaggccggcgaaccaggggaggaggctggaaggcaacttgaggtttaaggaatcgagctaacgtagaaggtgtcggcggttgagagtcttcaggtgggaactcggatagtggatcgtactcttcttcctcttctctgtcatctccttccttttcatcatcatcatcatcatcatcatcctcctccacaccatccacatttaagctttcgctcgtgtctgcatcgccttcctcctgatcagaggaactgggcggagcttcagacacaagtctagtgaacaatctcttaaacataggctctatccgaatcagtctcctcggatgatctcgataagtcgaagtaaatgcagaaatgacagaagctggaatgggcgaaggtatggtctgtgatgatgtacgctcatagaacgtacggctcctccgaggcgtaagctctccttgaccatctaccgacagatcagctgtctcgtccagcatcctctctacttcgtctgtcgcccgtgcagccggcgacgatgaaaaaatcccaatcgatgaacgtctagacattctggacgtgcaaggcgtagaaggtccatcacgggtcggaaaggaaagcaaagttctagtcgatccttcgatagttcggccatatcttggccttgttgtcggagataccggttcacgccggaacgataatgacttagaggtgccagccagatccgacaaaggtttgtgccgcgcatatctcggttcggatagttcatagcggcatcggccagggagcgagatcgatgaatcgacagaggggatagggggacttgaacatgtgtcaagaagagaggactgatagctaggctttctcgatgatacaggcaaggttgtggaaggaataataattattgatgacgatgatgatgatggcgaagaagagctcgaaacacgctttcgtttgaaagcagctggcgatttagatggggacacagaaggcacaggagagcgacatggaagaggcgacgattcacccggagaggaagatgaagaggagtcgatgacgatgggagatcttcgacttgtcggtctcactggaaccagagcgcgtctcttaccctttgcaattgtagaaagctgcacgatctcgctctcggtttcgctcgtactcgagcttgcagtatctgaacaatcttcgtcccggaggtccgaagaaatatctgagataacgcgggattgatagcgcggtcgagcgagccgattggcagtaacccgggagctaatcgtatgttgaggactgaaggcgtaacgaggactggtggcatatcgtggtctggatggggatgagtaacgtggggttgaaccgagggaaatggctgtggttgtgcggtcccgggcatataatggatacggacatgaatgcagcggatacgacatggtggcggacgaagaagggtacaatatcgaatgggataaatctgtacaacagcaaggtaaggcaaggtgagtatagctcaaagtttatttagatgaacaattccaacctttaggtgagaaatgttgaggaatgtcggaccatgagcgtaccgggaaagaagcactcaagcttggcgaatctacctaacgattcaaccaaaatgggttgagaaaagcacaaacatgaacttgttgaccacaggaagaagagtccctacttttgggtaacccaacagatggatgatggtaggtaggtgatgctagaatatgcctcaacaatttaattgcgcttacaaaacacgcccaaagccgaaaaactggagttcgtttacgtctatatatctgactgtctcttcttcactcttagaatcatactggttgtgcattgtctattcggccttttgtctaattgcggtcatagaaattctctatatgacctcctactcaccatcactacatgtgccgataaagatcgacgatgaccacgagtggttgaagatggacaagagacacacataccgccagtctcaaatttctgacgcgcgggcgagcgattgcaggtggtcaacatcctcttgaatctctcgctcactccgtcttcgatcaatctgagaaatctcattctgcattgccttgttcaaactttatacttgaacacctatctgttgaccgcatggacgttgataatgacatagcatcgactacgctctcaagctcgacgcccgctgcagtcgttaccggggctcccatcacgcagaaaacaaaatctcaactcagacatgagaaggagaagagagctttggccagagaactgagtggaagaagaaaagacggagaagagctcgaagtatgctcagtcggctggtatggcatttttagtcattttgtacatgccgtactaacacctctttgtcatgttctcccttgccctcctggatttgtgcaaattgattctggataaaccaatagacccgtgagaatgtagacatcgccccagaaattgttccgaatgaggagcgggaagtttcccaactaagggtatgttctctttaaaccctaaagttcttggttatcgatctctgttctcatcgtctagtcatttcgtctagatcaatcccgttcgaaacttcaatcgagtccgatattctagatatcaaatcgatactggcttcttctcaccttatcctctgtcgacagccgaagaatcagctctttcgagcggtccgtctccttctacatcatcgtcgacaggaaagttacgtgagatttcaaacgtagcagcagctgttgctgttcaaccacaatcgaacacgtccagaacggtagatactgaagtgccttctatatctagcgagtcaaggaccaccctgagagcccatgggcgtacgtcagatctcatttgggctggggggacaggatctttaaggccaggtggaagaggagatttgtttgtatgtgatgtgagtactaacctgctttccaaatttaccctgtctccatatatcgatatacactgctcactcacaaacggatggaaaccacgattcttttctctctagggatgtttcaaatactgccttgattttgatgcctatgatattcatcatgtccgtcattcctcaaaacctagcgaattgactttgaagagagagcgcagagcattgacctatcggctcactttttcaacccattgacaaaatagagatcatgtacaaggatgcatcctcctggaataaaagtttacacaagagggaaccaatcaatatgggaagtagatggggagaaagaaacggtgcggtcatagtccctcctcttcttctcttcgcatcagccaaaaattaagagagaaggttgctctgttcttctctacccatgtgcttgtgacatcgcagctgtattgccagttcttgagtcttttcggaaaactgttcatagattctaaaggagtcttctatagcgttagtcttgtgtcacgtctaatccaatcgtgccgatctatttgagtatcttctgatcttctttgagtatatttcgcggatatacaagacaggtcggtgagtgtgtttgagccagactgctgtcaaggtatatcgtagtactaacagcgattttggtctgaatatcgatttggcgatatagatacctttatgttctatgtcctgacagatactgaccggaagaaggactctgtcataggcttcttctcaaaagtatggtatcttacttggctcgatctgaccgatttgatttgcgattggcctgctcatgccctcttctctccggatctatcatcaaattaaaggaaaaacactcactagaagacttcaatgtcgcttgtataatcgtcttgcctccatggcaaagcttagggtacggccgtctgatgatcgagttcagtgcgtatcgatctcaacttaccccatcctcattcccggttgatgattcgtcttttcgtattacatcttctgactttggcttgtgggtcaataatgtcaggttatgagttgactcggtcgtctcctacgcccgggacgccagagcgcccgttatctgcactaggattaagagggtatatctcttattgggcctcggagattgctagggtttattctgataggttgacagaaatggaaaattcaaaaggtactgtcttcaccccttctacttatgagacttgagtaaacttaagcacgctaaagtggagagattgggaggtgtcggaaggaaaggtgcccaacagatattaacacatcggttttttttgctctagatccgacatcgttgtctactatgtcgattcaagagctagcagttgctgctcatatccgtttggaagaccttgtgcttgctctacaagaatgcgcgtttgatcattacgttagacgaccaataagaggagcaaaagaggaatacatcataatatctcgagagattcttgacgaggcaagtctagagcttctttccctttcatacgatccagtactctttaccatactttcgtaaacttaccaggtcgaataaaatcataacttttgtgaaaacttctttttctcttgccaacaaatagtttgtgattgctcgtcgtgtacgccctcgaatattgagcagagaccccgcgcacctcctcctgccgtgagacgagaatcgttgtatattagaacgaattatatggcttggttcggtgattaaatagaaagaatattttcgagatgacaagacaagacagaccagaaaagatagcggccacataacgttttttttctttgtcgagagtgcgaaagagccaaaagaactagtgcaagagattagacaatctgtttgttatttacgaggatgtttacaagaacactagcgatagggatgaaagaagatttatacaggattgacacgtccgtcaggcaaaagtgtgtatatatgtgcatacgtgtagagaccaaagaactagatggatatactggtaatggagagtgagacatatgaataaaacaaatggcaaaagacaaaagagacaccaacaaacatcctaccagaggtatctaggaggagcttcagcttcctcttcaataacatccctgctcctcgttcctcgatttgttctcgagtttccttcggcctctttcgagatgctttgttggcctttctcctgttgttccggaatccatgacgatgattctgaacctgggcgcatgaggtgtttgaccgaagatgaggaagatggaggccctgcatgagttgacgtccaattcggatggctggttgtcggggtggtgttagaaagatactcgatttggctgttcgtcgagcttatactgtattgggatgactgccgtcggtcgaacagaggaggggactgagggaagtaagattgtagtgactggtgggattgttgagagtgaaaagagtggctagaatgaagagaacgaggagatgaaggagattgaggcgaatgaagagaacgagaagaatagtaggatttcggtgaaagaggagcgaccaaaggaactggtgcattgtaggccgaggtctcacgcaaatctataggtcaagacaacaacaagacccagcgagtgtgtcaattaagcgcaacaagtaggaagggttagaagataagactaacaaagatttgccggactgttctggaaattatcttcatccactctaggaagataccctgatagacgtctgcccgtttgattgtcttcgacatgtccctcccgatcagctctagctccaactccaccactgtgactactagctgcacttgcggtgctctcagtatgccacactgcggcctcgtcggaaaaatcaaaactgagcgcagtcggaccagcgtcacctgaagcagcatcgataactgatgacgagtctttttcgctgtggtgaccaggctggaagatgtctttacccgagaacacttggctcgagagcttttgcttgcgacggaggagcaacaaaagagctatagcggccagtgcgacgacctaaacaaaggatgaatctaccatcagatggttgtatcggagataatcagggaagcagatgaaaaaaaaaaacgaacgactattccaccaacaaccccacctgctattgcggcggtattactcgcaggtccaaccgctacagctgtctgcgaactatactgttgctaaatgatccaagtagtttgataacagttatcagtttcgaagattgttcagatcaaatcaagtcttgaggaaatattgctaccacaagacaagaaagagataaggaaagtgcaacgtactgcactttcaactccgttatttgtcactgtacttgtaaaatagacggtccgataactcgtactctgatgagcatttgtgtttgagccattgacaacattctgaacctctgtcgctgcaatgttgacgccagaggtagtcgttcgcatggacgatctcggtaaggttgaggaagaagatgatgacaaggatgtcggttgaacgattaagctggagaaggaagaggaggtcgttcgaactgatacaaagctgctggtaatggatgaggatgctgcaatggaggatgaagaggtcggtatcgaagggcaggaagtagagaccaaagtagtgtacgccagagacctaagttccgaggtaaataaaaattagaataaaaaaataaaaaaggacgacagagggtgagcaagaattgtgaaaagcagagccaggtttcagccgtgcggtttgacgaatcatcgggtcggaaattctgatgacttgccttgtttctgtcactggcaaacttgatgtaacgaccaccggaacatttgtcgtctgtacaatcggcgtggttcgagtgatctgatcgactaaggttgatccgttcactatggtagaatcgatttcaactgatatggatagcgaggtcgcataaattgaagaagccgtggtgaccaaagtgggaacaacggatgttccgataaccgtggaaaatagagtcgcggtggggatgacggactaatcaaatgattttcaagaacgggtgcgcgattgaagggaacatacagggaaagagaagaaagcaagatgagaaagagcattgaatcaaaatatcagaaacccatctgatgatacttctcctcttcccttcttagtgcaggacgaagggaagctggtagacgtgcgatcataagagagaagcaagaggacactcacacatgccgcctcgttcgccatgatcaatttgacagcctagaacaagctgaaggaatgataaagataggaaggaaaagaaggagagagagaaaaaagaaagaagtgcggtcgattgaacaacggaagtgaagcgactgaaggagttttgacccggtatggttcagagagtcgttcggttattcgatctgcgtatgagtgtggattaaccaatcaataaagcaagcgatgtatatgaaggtacgaatctcggtgtcagttggactgtttatcaggagcatgagagtgcggacccacagaaagatagagtgtgggggcggatgtgttgcatggtgatcggcatggttatacatacccttttgaagcgcagcaggcacatctcgagtgcatgcacttgttcgcgactgccggctgccgatgaagccaggcgttcttgcttcgctcgggttcggtcgggcgtggctggccgatcgctttttttaaattacttagaattcattcaatttcaaaggtagacagtgccaacgctcggccaaaatgctgatggatcattcaacggtagtcaaaaaatacaggtgaagaaatagacacagcaaacccagcatgtcgtccccgcatgaagacatacacacagtcaggtatacaaaccaatatatatttatctatctatccgcctatctttatttcttttcgaacgcagtttcaagccatggtgcgacctttcgagcaatgatctctccgtgcgctgaatgaatatcggatccaaatcggacgaccagcagtaagcacgtttcattcaccgccacgttcattgacttgttctctcaacttcaaaatgcaaaaagcatgtctccacctgaactgggcagtttataagtcagaaggacaaacctagacaaaacgcatgtggaatagactctacaccatgccagatctatagagtgcaagatttcaataaaataaaatataaataagataaaacatgcattattagaaacatcaagatcgttcatggcaggtcatctgtcgcatgctgtatgcaaggaaaggagccaagaacagacgcagacaaaccttctgatcgagtgtctcttgtggctctacttgcacctcagtgatcgtttgttccagcacatctcgaatctcatttccgtgaccaactccgacccaaccatcggattctccccagtagccccatattctatgcctattggcttttagaaacgctagatcaggttcttgaacaagatccatctcggatcgacccaatattaacgctgcacggatcacgtggaaactttggacgagagcgattgtaggcgccggaagaacatagctcagaagtccacgcgggataagcttcgtcaaaagagatgctcgtggcagaatatatatcaaaggagagcgaaaaataggctggttggacagaaggatgcacattcaatgacactggctagtgttagacgtgtttctttgcctttaactcgagctggaacagaaggaggcgcacctgaagttgctttccattaggagattgggcgatgtgagaaagtgtaggaaacaagagcatcgcagatgagatctgaggtctctgttcgagaatctgatggatcaaaagttcaagaagaatcattgtcaagaggtctggccaaaattgatcttatgagaccgggaacaccaacttgtatactcatccaggaccctaccgaatggccagagattcctacgtttacgtcttttccgagaatcctccagacttcatccaagatctcgagcttggcttcgacctgacccggtagctcgaccggattcatgccggagggtataggtgggaggtggggagcatgaccggcttggccgatggctagaatgccaatatgagatgggatgagtgtgtagagcgtttggaggaaagagtcataatattctaagaggcctggattgcctagtgatgttttgtaaataatgtattgatcgaaccgttagtcacgtcgactcaacgcaaagagacatggaagggcaagatatacctggtaggtagacccagagagctcggggttgtgtgtcaaggtttcttggaggaaagtagtagagatctgatcgatgatgggatgcaagaggacaagaatgttgaaaggttgatcgatgaaaaagcttatcagtatttgccagtctgacacgaagaagatctgctagaggcgtagttgacattttgtgtagatgcaatatgccagacaagagacagaacgaaactgtggtggatcataaatcagagaagtcaagatgaatgacgatagtcacgtgacgagcggtaaacgctcacttttcgattacacttgaatgttttctgtggctgattggtcgaccagatggtggttacacacccggcacaaaggtaccaatttgcccgctcgaacacaagccacacaacgtcatcgtcattgacaaacttaaacagaaaatattaaactggtgagtgctctcttggtgcgcctgtcctgttccttattgggaaagcaaaagaaataaaggtgcgtaatggcattgggacaagagggttagttttagtcagtgcaagtacatctcgtcaccgataattattcaatctccaactatcaccatcaataccacgtccgatcatacacttactaatccaatcaatccatctcgcatgtccccagactctaaaccgcatccagtgttgcctcacgacgactacgagaaggcgtgtaaaggtcagttttgcccataatgaaagattctcattttgaacggtcttcttttttgtcctgtcaacactttctatctgttggagtggcagtcttgaatacgagcctgcgatctttaagttgccgcatcgcctcgtcctctcacatctttttcattcttgtgaaagaaaaaaaaaactgattcgtcttatgtctctccttcctttctttttctctttgtcctactctatcaacttgttcccttatatttgtcgttgataattgcccatcctaaattcatacctctcttcttcaaaaatcaacttggttttgttcaaccttggtcttgttctatccaggtggacccactagacgcttctcgcagttcgtcttttctgattcttgtccaatatctggccttcatctctggctacatgtctctgtcaggttctgtagctatcagctatcgttctaacattttctttcatttcttatcgtcattcagagacggccagcaagtgaccaacccaatagacaccaaatctcctcttccgatggaaactcctgcttcccaaaatccaccgtcctccataggaaaggctgattacctcaagccagataacagtccgaacgccaagagtcaagacatcaccgttgctgatggatctgatactggtggagtacgttggctttcacagagcattgtccaagattaatgctcttcttttatccttccatctagtactgatgagacatgttttccctctcaggcactgaaccgccacccccagccggctgcctcggcgctcctctctaccatccctgcagctccgacatcagcctcgaacgatcccatctctgcgctccctacattccgagttggagtgtccgaagaccgtaacaagcgatgcagaaggagcatggaagatgcccattctttcatctatgattttggaggagttgaaggtcaaggatactttgctgtgtttgagtgcgtaaatttgatcgcaaccgttgcaccccataatgtcattttcttttctgctgacgatccaaatcgtttctcagtggacacgcgggaaaacatgctgcagaatggtgtggggctcattttcacgaggtacgctcctttgctccgtacttatggtgccaaacgttcgaacataatctttgaacaatattcattttctcttcatgtacagtgtttacttgaaaaactttcttccgatgggtcctccctttctgtacccgacatactcaaccaaactttccttgcggttgactctgaactctctaaactcgcccaagaagaaaagacacattcgggttgtactgctgtagtggccttcctaagggtggatgaacctgccgccgagtcggatggaacgatcactgaatctctgggagctatctcgcctgagcccgtcaattcgactgaaaacagcacggatccggaagaagagaagagcagattgactcgcatgaaaggggttttcggaaagatcacgggtgggtctggaaacgggggcggcctgttctcttccaaaaaaggtgatagttctggtttggcatctggagcacctgtgatcaggaagagtggagcaaagaggacgcttttcactgccaacgtcggcgacgccagagctgtgatatcgttcgtctcatcttcgcgcttggtctatcatctgcacttcatttgactttgtttctgtcgtgggtattctcgttcatggccggctacagccgacgaggcaaagccgtccgcctgacatatgaccataagggctcggacgaacaagaagccaagcgaattaccgatgctggtggatttgtaatgaacaatcgagttaatggtcagtatcctttgatgatgtatcctatttattcgagtagttctactgtctgactacgacaataaacccaggcgtgcttgctgtgactcgagcgctcggagatgcttcggtcaaggagtttgtcgtcggcaatccgtatacaacagagacccggctggacgaaggggacgaattccttattgttgcttgcgatggagtgagtagtttgtttctaccaagagtttcctttggcgatgtttgtactcatcttccatcgtttgaattgtttttcctattcgtagctttgggatgtgactgaggatcagcaggcggtggatttgattgccaacgtagaggatcctcaggaggcttctaagatcttgctggatcatgcattggagagctatactaccgacaacctgagtggtaagcgttctgtgaacattcatgagatcatcatggatcacatactgacatatgtacatcataccggggtttcttctcattcagttcttgttattcggctgaacccgaccaatgtttgagcacaaaaagtccctttttcttttactacatcagacgccctgcctcagcctattcttccttctgtatttcccttcttgcgagaatgtttctttgtgcaagcaaattttcttgtaaacttagtatgctttgatttatctactcgacatcgatgactagctgagctgtgaactgtgctcagtcgcttccttctcgagtctcgagcaggcatagcatcgtgctatctgttgtcccgaaaacctggtcaacgttactttgtacctctctcgcacgctctgctgatttttgccacacaacatcatgattgaaaccaagagaactacagccaccttggtctctgttgctagaccaaaccgagcgacgggaagcgatcgatgagtcacgagagtcgtcacagggaacctgcaggtcgcggcccagttggcgtgtcaggcgttgagtgaggtacaaccttagattgaagtggttactctagcctgtggccgaggtgcgatgacggatacagttgttgcggatacagtctggttcgtggatgggatgggatagaacaaggtagaaccatgtggaaagatccatcttgatggagtaatatgtagacagtcgataagctcggcagtcagcatccggccagtcgcggcccagtcggcgcttgatactgccacactctgagccggatgcccgaagagattgaattactttataagacggctctccatccttcttgatctttgccacatccctctcattctctttccagttcgccaccttactgtcaatttgccaccttcaagactctcttcctcgcatccctgatcaaacgtactccaaagatatacagatagactagtcacaccatgtctacaccaacttttaacgagccaaggcggttcaaagtcacccatcctgctgaacaggtacgtccatcttctgttgttctcttctatccttttgtcatactatgctttcattctgacaagcatggtcctttcatatttatctccacgtttcagcttgcccggcggttccggtttcctaatccccccacctacgcagctcttgtagagaagattctgtcctactggtcgtcgacctcgctcaacccaaagaccatctcattctcttacatcgacgctcagggggatagatgtgtgcttagctcggaagaggaacttcaggacctctatgaagaactcaatgatgttggcacagctcaggaagtcttaaagatgaaggtcgtcatccttggagggcctgtggggattgatggtgaggctgatgtagaattagaggttgagggcttgatttccgaggttagtcgctttctttcttttcatttccttattcctcttttctgacacaatgtgactaactatgtatttggttcgatgctctcgctcgtgcttgcctgaattatacagatttcccagacggacttggccgacgatgccgagactgagatgggcgacagatccaccttttctactgccactccctctgttgaagacgctacctctgtttacggtgatgctcatcagaacagctcggttccttctgttgagtctcaggagaataccgcggaccccgaggaggtcttcccaccccaggttgagcctgttgccaaccctctttcgctcctttcggatcttgccacccttctctctagcatttctgccaacccggccttgtctacaatcttgtctcgagcagctcaaggtgcttacactcctgagttggctgctcatgtaggaactcaaagagacagagttgagactgagcttaataaagccaaggatgaagtcaacaaagggtttggtcaggccgcgcagggttggaaggacttggagaccgtcttggctggttttggcaagagtgctgccgaaggattaaaggaagcggaagagattagatctcgacgaatgcacgagaagcggtcccgtgaacaccacgacgggttccaccgaggtcctggcttccaccatcgacaccatcctcgacacccctcgccttcttcttttgaaactcgggataaccgacctgactctcctcctcctcctggtccttcgtcgccaggccgtgaacgatcgagacatggcagtcctcctggatctttccgccaccatcctttccacggctctcaacgctcccatcctcaccaccgccgccgtggaaagtcggccgagaggggtgttcctggagagtttgatactaaaggtgaaaaaccccatcgacgattcaaccc

SEQ ID NO: 3165 - DNA, 18641 bp, Xanthophyllomyces dendrorhous
tggtcctcctcctccgtttggagattcatttgaccgagacgactctgtcggagatcgtccagatcactttcatcgacgagggtggggcaatcatcatggtgggccccgaggacatacctaccgacacgaaggacacgggtacccgcatggtgacttctttggcagattccctttcttcgtccatccctcggctctcgaccattccgaggcccatcggggctggtggcagatgatgaatgacggcccttccgagatgaaggttgatggagtgccttacgaccctcagactggagagcccacctcgcagaacgagaagcctgaagagaagtcaaaggaataggctctatattgtggcctgttgcgctcccttgctattcgacatctgttgaatacattgttcctctgtctatagtttattttcctctcttacgtctccgatgacctttatatacacgaccttgatgattatgaccaattgtacattttgtggaggaaatctgtttatgtttgtgaaatggagacccaacggtcctgtttcgccctgtcgctctttcttgaatcaggaaagcacctagcggggatagaccaagatgctcaaagacgatggccgtagatgaagaacgatgcagaagtgtcaatgaccctctatggtaagtgcttctcacgtcaacctctcaagctgccttgccgatcacaaagattgagatttacccgaggaccgatacgcgtggcggtgtgttagggttagcaaatgaagtgcaccagagaacatgagatttcttattaaaccatctacctccttgtttctttttcatccctttacccgacgaataacgacaactatcatcaggttcattgacagagctgtggtcgtcatcttaacttgatctgatctccggaagacagccaagacagccttggagttgtttcttttcgaaataagacgaaaaacgaacaaacgacaaatataacaagaataaaataaagctcttcagtctgagctcttggcaatcatataccaatcaccagttgtatcgatataatcgaccttttctcctttatctacccataattctgagattttgatcggccgaacaactgcctaccacatacaccaatggacacgaaacactctctttcttttacatctcatcctcgtcgaagttcgtttcttagcccttcgtcttcaaatggcttacacaccactggatctcatccgggtcgaatgcagcctcgtcgaagatcatacctgtcctttctggtgcctcggtccaagatccgttgtctctttgtgctcataacgctttttaccaccgttgtggtggtcggtctatctttctcgattttcacgttcgacattcctccgttgaatgaatacgatgtcgaacagacaccaagagtcaatatctcacggtccttcgaggaacccgatttcgctcttctctccggtgcccagccgcatacaatcggttgtcctcagaaagattcatcgagtgcaccgttgctgttgcttggaatcttttctgctccagatgatcctgcaggggaggacacaaaaagattgaacagacgaaatctgatcagaaggaaggttatgcctgattggcctgctcaggtcgaacttcggtttattcttggaagacccaagacggcagcaatcaggaggatgctttcggcagaacaagagttgtttggggatattgctatcgttgatggagtcgaagatgttgatttcggaaagacccatgcgttctttaaatgggtcgcacagaagagggtaggagaaaacccaaagtttgtaatgtacgctctcgttccttccttcaactcgtacggtgcccaagtttgagctcacagacgcacgggcatctacgtgccaagagacgcgtagaattcatttactgacaacatatgtggaatgtggttccaatctgtcttgacaggaaaatcgatgacgatgtaagcattcatgttattatctacaactctgttctctccccctgcttcccccctatctctttctgttgtgaaaatttatctcgactagtccatgttcattaaataacgagtgcaatctgataaacagacgttcctggtcatgccaaatgcgatcgctagcttcgaagcgcttgattgctcgaaaaacatctattggggaacctcggcaggaatgagttaccactttggattctacctgcgaggtcttgggtatgctgttagctggccattggttcgtgataccttactaccagatgagatcatcttactttctcgttcagaaagtttgttataaacaaaacctatcgagaaatttgctaactagtgttgggtacttgtaggcttcttggataggttcggcagatatgtacgtgtgcaatatgaggtctattctgagatgaccaatccaaagtagcacccgtaaatatattgatcttctctgagaataacaccgagttcttttgtgcttgttttgacctatcagttcgaccgcgcatatctgcaaatacgaagatgcacgaacaggacagtggcttcgaaacctggatcctgtgactgatccaattcatgttgtggacaacggttggacaatgggagactacaaccagctagacgttggcgtggagagtgtagctttacgtacgttccgtttctcaacccatttcttaacctatcgcgtattcctggaaaggaaaagtgtaggaattatgatcaagcgagccaagaacgaagctgactggtttgtttcatgatgatttcatgtcattcagactggctcaagtttgacggttggtacgaggagcaggtcgaccgtgtcaaggagatctggagtaaagcaggccgtcagtgggcggctgatggtggagtcgacccgaagcagtcgatagattttggaaagaagttgcccagtgccgctcaggcagaaaaagatcgtcagaaatcgttaggctgggatgtatgaatctgagttcgatccagttgaatcacggacattctgagcatgtttacaacgtctgcgatccgaacaagtaaaagtctgtgactgaaaacgaaagagaaacaaaagaagggcgaacgagaagggttgtcagcttgatcgtgtgtttttgtttgctccggccatcctggctgtgtaaactgatcgcgttcggttaccgtttttttcccttccctttcgtcttctcgacgacgacgacgacaactaatagcattgcagatcctctcccaatatcccactccatcttcatctcatttctcctccatcctatctcttgttctttgattagattggtattcagcctatttttccaacctcaacccactagcttggatggatcgacggcctttaggtcctagggatcatcgaggggaaccccctagcagagaccaagcattcactgagatctttggccgacgcaatacccatcatgcccatacccaacctcaacttggcgggcctcgatacccaaaccaacagggaacttcctacgcacccgttcacccagcccgtcatttttcgccttcacagcaggtgtaccagtcatctgttggagtcggtagaccgaccccatccgggccagggacctacgatggatacgccggatcccttggtattgggcctccgcctaccggtccagatgggtcttatccaacctacagttaccctgtaagtcatgtctatagcttgcctccagctatctccatcgctagtgtctgtatcctctctctagtatccatccatcttgcttgttcttctcggcctcctcggccggccactccttggcgggtccggcatctctccatgctccttcatcatctccttgttgtttcttcttcttctttcttctccgattattataaccttctatctctcaggactcagtttaatgttgtttcgctattcacgaggcaagtgctcctttcgttgaccctgttcattcttttgtactttcctctgtggcccagtacaagccatcggttcctaacggaccaagtgctcagttcgaccggcgatcttcattcaacccttctgttcattcgaatcatgtatcctctgctcagtcgacctactcacaagtaactcatccggtctccggaccaccagtcccggcaaattcggtgtactatttagttccgaatcaacaaagtacatcctctatcaatctgccgacatcaaatcctggtctgcaacaatatcggactcaaggcagccaacgctcttctgtgcaagcactataccaaggcgttcaggctgcatacccttacccagcggggggatatgctagtgatcctactgttctacctgaacagaacggtagaacaggtggtttgaccccagcccaagcctaccaagctcaagtaggaggtgatggcttggcggatttaaaagcgaacacgagcgatcaaccgtctactgaggtttatccatcatcgatcccttttccaacctctcctgccccccagtccaatacgcattcatacagtcatccggcctctcatgggtcttccctatccacgggtccctcgacccaaacaactcagtccgccggaccccggggacctcgattagctccacctcggttgccggacctctcatccatcatgggaaatggtggacttgggttgaatgctatatctctggaaccctggaatgaagtagcactaggagcgaccacaccacgaccgccaacggctgacgagactgagctcggatacctttctactggactctcacctggcgaggcctcaggttcgcacaatgtgttcttattttgttccactcatctatcctcactactctatgcggagccttggactgacagattgctcactttatatatggatatctgaatgaactgcctccatctataacaggcgcatcttctgtatactcaccgtcatctagccgacctggatccgttaactcgaaacatgtcagaacgccttccgagtcatcgaagcgctctcttggtctgtttgaccagaaccgccctacatttgctcgttagtcgaaacagttttaatgcattcaactatgctgtttatcaagaactgatcttctgacattgcactatgtgtgcaaacgcccaccgtgatttgaatgtagctctcacccgaattgatactactcccaatcttcgccagacaatctctcgacctctttcatctcctacttctacatttgaacaagacgcatttcgtcgtcaacctagtgctcgggatagtgtagagagctttcgtagcgtgcctgcaccgtcatctcctaaccttcccgagactcatgacggccgatccatgagcttctccagcgcttcatctgtcaccagagcagaagttgtatcctccttacggcacaccccctccagatcctccacccatggtcaatacccttctggccctgtgtcgctgtatcctctatcatcttcatcttcgtctgtaggaggcatcaagagaccagcgacgggatcgattacccagatgactcgaaagtatacgaaagtgtaccctgctctgctttctcgagtagcagaggtcttccaagccaatatctttctttctgagcgggtaaaggatgggctggcgtacaatgacgcgttcaccggtcgagaggctgtggatcttatctgcgagattattcaaacaacagatcgaaatcttgcccttcttctcggtcgatcgctggattcccagaagttcttccacgatgtcacatacgatcatcggctcagggacaacgccaacgaactctatcagttcaagcagaaagcccttccgagctcgacttcctttccctcgacagccttccacccagaatctgaaaatcctcttgatgacgaagcttcggtcatcacacaggacggtccctggccatctcatcatgccaaacagttgacttcgctcacttcttcgtcaactatcattgagtcgtcatctggtctccattcgcctcacagccccaatttccgccgttcgatatcaacctcacaaagcaacgggttaccaccgtcacctaattctcatcctgttcccgaagaaaacaatttgcccacgggagtgcttgtgattcttttggactgctactctcccacctgcagcgataactccttatgctactcgagcatgtgtccacgtcgaacagaacaggctcaagcactcaatctaaagaatcagccggggttgcctgtcttgaagaagcaacccagtgtggaaagtttgaaggacgctgaaggatccggaggcgaattatgggctacatcggtgtcccaggccgtcttggactccgttagcgaaactgagagaaaacgacaagaggcgatcaacgagctcatcgctacagaacgacactttgtcaaagatctagaatacttgcgtgatgttagtgacttctgtgctattcgcctcatcccaggcaacatgctaacttctccttgattactaccttcgcctcaagttttggataaagcctcttagggtgtcagaggtcatccgaccagcggaaagaagagacccgttcgtcactcaggtgttctggaatatttccgccatccaaaacaacaacgccgctctctcagacgcattaacgaagcgacaacgagcgcagcctgtcatcgaaactattggtgacattcttcttcaacacattcctctgtttcaaccatttgttgagtacggtactcaccaggcttatggaaagctcgagttcgaacgggagaaagccgaaaatgctcagttcgtgaagtttgtagatgaggttgaacggaagccagaatcaagaaagatcgagttgaatgggttcttgacgaagcctactacgagattaggtcgttacccacttctcctcaaagccattctgaaggtcacggatgagaagaacccagaccaaaagtggatacctgaatcaatcactttgctggaaggctggttgaagagggttaacgctggagctgggaaaacgcagaatcgattggatctcgcccatctcgagcaacaactacgtggtgacaaagatctacctgtatgtacaagatataattggttgttctgtcggttcaaatatctgtctaggtatcagatgctcacgaagataccgttatcattttaaacagaaactccggttgttagatgaaaaccgagagttgattcataaaggtcaactaaagcgtcgtggcggagcccaaaatgagacggcagacttggatgtttaccttctggacaatatgatccttctcaccagaactaagtattcgaacaaagtggagaaaaccggtatctatcgaaaggttcgttagaacggtagcattttccttagtcaagcatatctgatattcttttttgttcaattatagccaataccacttcagctgcttgtgttggcaacccctgatgaacaatacaatctttcgaaacacggtatccgacccaaatctctactatctcgaacttccacaagcaaatccaccacatcgtcaacaagtgcaaaaccagagaaggagggaaaatatggttattcgatcactctcaccagtctaggaaaagacgcatattccgtcacgttgtggtcagagtcacatatccaacgcaaaaactggctggagaagattgatcaacaacagacgcttattcgggatcgacatcgcaaactagacactcaagttctggaaactgtgtttactggtcagctaaaggtcaactgtgctgccccctacggtacgctattttttcctcctcaacaatctttcgaataaatttctaaactgcttccacggacgggttgtttattgtaccagacgcggggcgtcggatgatctatggcacagataacggtgtttatttttcgaacttgacggaaccagaccgccccccagtgatggtccttcaactgatggatgtgacccaggttgatgtgctagaacaattccaactcctcatcgtactttcgggtaggtgccgttgtatagcaattatctgctcttagtttatccactaacttttcatgtaaatcttgtcatttgaagagcgatccgttcaaacctttcctctggattcactcgaccctaaagatccaacggctgctcttaagcgcggcaaacgaatatcatctcataccacattcttcaaagccggaatctgtgttgggaagatgcttgtctgcatcgtcaagtcgagtcctctctcaaccaccatcaaaattatggacccaattgaaactcctatacgtaaaaagcaacagggtgcggcgttcagcaagcttattcccagccggcacgatacgcttaaggtcttcaaagttagtacccgcttataccgttcgacttttcacccaattgttgactctttttacttttttctacaattctaataggagttctatattcccaccgagtcaagctccatccactttcttaaaaccaaactctgtgtgggatgcacaaaaggattcgagattgtcgatctggaaactcttgacacacagggcctcctggatccggatgacccgaatttggctcttgttcaccgagccttcaataatgctgcccggattccgaagcctattgccatctatcggatcgaaagcgacttcctgctttgctatgatggtaagcttcctgacgcagtctgatgctgattattctcttcgctgcaaatgatgtactcacaaagctactattgcttgttcgaatgaaatcttcttaattgctcggctgggtagattttgcgttctacgtaaataagaatggctggcgggttggacctccgagaaacaaatcggacagggaatggcgaatggactggcaaggatctccgacaaactttggtgagccaactgaaagtagttgaaaatatgtttgataacactcgaaggatgaataattgatttgctctcgaatttatgtgcgattttaaagctcttcactatccttatatcctcgcgttcgatccttcgttcgtcgaaattctggatgtgaacaccggtgctttccttcaagtcattcaaggaagtcatattcgtctcctattcacggatactcctccttcgacagtccactcagctgcccagcttcatcaacttcagctgcagcaacaacaacgtttggcttatggccgaggcggtacgccttataattcctctgatcatgcatccggctggcgacctcccccgcctcggttgcctcctcctcctcctgtcaatcctagaaacaagatcgtcttcaccattgatgacaaggtggtcgagattcaaccaatctctctccgatgaccaagacgatcttagtgtttcttttgttcttcatcgtttcactccaactctcctctatctgggaattaagcattattcattgtacacattgtcatgttgtttcaatatactattctaccaatcaagcctatgccttaggcatggtgacagtaatctcaaccgatggcagtcgatacatggcccttctggacttgagtgccctcagaccgcaaaccatcaagatatcaggaatgcgaccgaagtgttatatgcatgacacacatttctaagcttgtgttactaccgcaaactgtgcttcccttctgttttttgttgttgggattctggcagtcttaacatggtttagctgtattgcgctgtttcctccttgaggcaacatctttagatcttgcgcgagttctcgaatctttctcagagtcacaaaacctgctagctcttctccgttgtccctctttctcgatccatcccactgtggcgcctggatggtgagcatatgacgtctggaaagccagtggagactcggtcgggaacaggcgccagaataaaaagtccgttttcacctttgtgaagattattactgaaataaaagggtgaaaatggacttttcgctctggcacttgttcccaatcaagtcctcactggtttcctaaaccatatacacactacccaggtgtttcagtaaaatggattgagaaaccaggaaaacaggagggaacccgctagaaaatttatagctcttcggaaagagaggcttgggactccgcgcagaaggaggtcggaagatgatgtctcaagagttaataacaaaaaacagatgaaattgtgtcaagattgctaaagtcccaacaccttgtcaatcaaaacgattgttataagtgtgtttgaacggtttaacatcaacggtgaagtggccgagtggtctaaggcgctgtgttcaggttgaataacctagtttcgcagtcattcgtggcgcgagttcgaatctcgtcttcatcatgatatttttattttttgaagctgatacctatacttcatcttctctgattggcagtgaaggtgctagagtgcacaccatctaggtggttcaggagactgattaaagaaccagagaagagagatcagacagaaaacctcatatgttcaaacgcttttaatgattgattattccataagacggccaatctattacagctgagattatgtctcaactacttaatcccattttgatttggagctgctgagactagacccgagaattactaggatgacggacggacgggtgggtgttttaagttctcacaaactacctctctgattgaaatcatcgaagatctctctacttttttttcgatctgtttatcaatttccatacttttcacacttgagaacaaatgtgatggttgagcagaaaatgcacgcacctcaaccctgtctgaagcggatatctcttgacctacttcatcagatctcccacccacaagcactttcttgctccctcttgagtctcctccttacactcatctctctattcttgacatgtctgatgtaatgtcttggtctccttgatacacccatcttctacatgttgccgcgagaatcatagattctaggttgtagaccacttggactcataatatctcaaacaacagggcagaaaaaacatgcataaaataacatctaaagtaaagcagacgaggacactatttacacagtttaggagctgtcatcaagatagcagtagtcggcgtagttgacaggattaagcgcccagttgggcatggcgacggtggtaccgtttccagcaccgaataaagcgaacgtcgtaataaacacgaatacctgcattccagcatcgagagcggcagacatgatgtagttgtacctacagcaaattgagattacatcgaataacgggttaagcgggttctattctcgagaatgtcatttattctcaaggttataggatgaacgtactttcgaaaccaggtcggtcggtaaattcgtaaatatccttgagtaaggagggcctgaaaaagaaaatcactcggaggattaggctaaagctcgaagcataattcaactgtcaactcataaggactaacagtaacgacactcataaagatggtagagttgataccagctgctaagtaaccgagagtgtaacagaatagcggagtgatgaacaggtccattcggagcttaggatagtatcgatggatgatccacgggatgatcggcacaccaaagccaacgaggaccgacaacggaatcatatcgtatgttgatcctgggctgtacatgtcctgcaggaagcacaaaaacgcaagcagacagacaggcacatacagttagacgtttgaaacaatcaaagtagcaaaacagccagcgagggataagattggcggttcgattttaataggcaacgaaccttagcgagcgcaccccaagttacggcctgagagttaaatgactggacgttttgaccagacctacacaagagaaggaaaaaaataattcagtcgagttcctgattgacggcaactacttaagaaaagatgaagcgagcgattaagactgaccagatgttgtttcctgcggggtcaagaaggatatctcggtgggagccaatgatctgcttcgagataacgatctgcaatattcctcccagaacggtacctaaagactgaacccaaagcgtagttcggggaggaagctttgtgtattgggcaatcttgagatcggacgcgaaagcaattccctgagtagccgcatttgatccgtacaaaccaaagtacttgattcatcaagagtaaaaggtggcaacgaccagcagggtacgttaacggacaactagaaatgaacaggtctatagtgaacaacaatctcggaaggcttaccatattggcttgcgcattacctggaacgacagcggagccaagcatgagcaccaaggtctgaatactgacttgccaaccggtgatagccgggactagggttcaaatgtatcacgattatcgatcataactaaatgtgagtcaattgcaaactggagcataaacagtccaaataatttaaacgcacagattgagacgaagggaaagaggacgattgcaatgatgaaggcgacgatgactccgtaccaaggcaaatgtgagtgaccggtatctgtttcctcagaggttgccatgtcaaagtgatgaagaacagatgagaaagtgttaaaaaccatcgaagagatgacatggaagaaagttacgtacaacaagtggccatggccatcgcaaaggatgagactacgatagcaccgtacgcccacattggcacctccttgtactcaagcatcttcctgtagtgtgcatcatcggtcgatcgagaacggaaagcagtggcagcctccttaacgggttcccagtaccagagcaagcagtgagtgattgtggctccaattgacagattcaagccgagatagtatatagctgttatgactcgagactcaatcagtatctttcagtctaaccaagtgagaacatggtatgaacaacgtacccatcgaggtggcaaaccatggaagaccttgctcttcgagtaatgttcggttgagcgagtagtctgcgttgaggatcaaagactggtcgtatgaagaacctgaacagcacgtgaatgcacccatcattgtcaacacacgattcacaaataaaaattcggagggccagagaacataccattctcgtaaaacaagtcttgagccatgaaggggaagttctgagcctgccagacattacctgcgtatgcggtgagtagaagggtcgccgagacagcgactctgagttgccaaggggacaaaagtttcaacgaatggatagtgaattcagcgagtgacgagcagaaaataagacaggggaagaatacatgcagagattagacttaccctgcgtacaaactcatctgagtagccaaaggtgtgtatagcgaactagccccggaaagataagctgttttggagataatcatgtcagtttaaggaacgcattggtatacgactgagagcaagaatccttaccccagtcctattgttcgtcaaagcgaaccaagtcaataataataaaataaatagcgacagtatgtaccgatacgatgatctagaattaacttacaagacagacggagaacaacgccatgccttcgttgggataacttccgccaaagatccgagtcacccagacgctgtcacgcttagccagacagaagatcgatactcccgtcaaagtaggtgcgatgaattctgaagtagatttgaccatatacatgtcagactgagcaagtgaggaccgaagaagcccaatggtgaaaactaacctgggaaccattcccaaataaagattccgagggcaacgagcaagaagaacttcattcgctttcgctgaccagcaatatccttatcgttgtgtaacagttggaagagctgcacagtggggatagtggctggccagacggcatatgacgggtaaacctgattgagagaagcatcgcaacagatcactcggaatttagcagtgaaagaacagatcatagatgattgagacaccgatttacggtgcggagttgagaaaccggacttaccactactgctcgcatgagtccggcctgcaagaaacaaaacgtcagcgttcgtattgaacatcctgagaacaaacgtgaatggataaaacttacgataccatatcccaggaactgagaagcaatcagcgtaaagatcgagatcccgtagttggggttaagatcgtagtagactgcagagaaagaacaattttatgtttggtcgaaggtgaacgcgcatgatctacaattaaatcaactcacgctcatcagcagcgaacacagagattgcctgagcactgctaaaagcagttgtactcatgataagagtgctgagaaagtcggaaggtttgtgtagctttagtagggcgcacacgtgaagaacaagacgtaagaagagtgtgcgtacgcggtgtgctccttcaagttgaattcgcacgggtttatgaacgtccaaatcggtcgtcggtactcggtagggaaaaacctttgtgtaagacgctcgagcgcgttaaataacatataccatagtcgtccgagcatgtcggcaatgacaacgataaagagcgaggagacggtcaaagatgaaggcctaattgtgacgcaggaaatacaactattagtttcataggtacgttcactttggagcgcaagctgaaccctacctgaagtagaagatctgtccgaggaccgcggcgaaggaggtgagaccgagtcctaatgaagcatgtgatagaaaatactgagttccggccggttgatggacagatatgaagagacattgttgtgaacataccaagcacatacatccgtaacgtatggattggcatgttaacatcgtcgacggtagcaataagtcgagtactaaaatcgacggccgtcttcagaaagagagtaattgattcagctcggagtttcgtcagctactgtgtcttctttcttcttttcccttcagaaacatggggcttacttcgatgggcctctcctgaccgttactgagcagattggcaggatcaagctcatcaactcctagcgctgaaggatcgatggccttcctctcgtggtagtgagcgtcgttgttcctctccaatggaaccttcttgtccagtcccactccagagagttcatgctcctcttcttcctcgtcatctttgcttccgggtgaattctttaatgaaggggtcgtatcgattggggcatgaatagaatcctgtctcttgaagggctttctcagttgagacaacattttggcataaattttcaggcagtcaatctggccctgattagtgatgagtgggtgatcaagaaaggcgtgaagaggaagaagaaaggagcagagaaaaattaaccatggtctttcaagggtttcgacgactcatctctcatcatcaatttggacgaaaaaatatcgggtgtcagataaatcggccaatcagataaatcgataggccgagcgcgcggtcaataaatttcaatcaaaccgcacaaaccttatgaacggcgtcccgccgtaatgtgctgggtttatacactccctttcaagggcttgcgtgtttttttttttgtttacttccccgaaccggacaaattgaaagggttgttctgatatctgagtatgccgattaaggctgaggatcgacacctcattaacaaagcctcagcaaccttccataaagtcgagaagatgaccatccaggaatagaaaagaagaggagaccacaaattatccgtcctcgaatcggaagagaaaaaaatctgatggtctactgaagttcggctcggccccatacgcgtcccttcgttcttccggctcagtcaggaggagcattggtttactgatgagacattgtggtgctctgaaactccatcttctgctccacttaaggtggtgttcgcccccagaagcaattttgattggctgtgaaggactcgttaccgagcatctttgactatcgatatatatgaaccatcggagatagtatcatcctataggtgtgtggtatggatgtcacaaatgattgctcgtcagtcataacgaaggtcttcagtgtatcctatctggataccatagtgatcgtactactctcactctttctcattcctttgagccaacacttttcttgttttactcttcttgtggtaactacaagagtagttatcgtccatgcgacatgagatttatgtggttacgtttatcacgcaccgcgtgacacgtgattgagctcacatatcgtgcgattaactgtgaacgatctagtttgctatccacacttacacctccagttcaaagaaacacttgtctgtttttcttgaatccttcccttctctgaagtctcttctatacagacagaaggactagcacatgctgtggaaagcaaggcagtcaagggtcttgcctacattctccctccgtatgtgtctatctgccttgggggtttgttatttgtctggctttcattcacctgaatgttctgctctcgaccgtgtctcgttctcatagccatatcaaagcaacccttttctatcactgtctgtcgtcctgctatttctcggagcgagccttgggtattgtcccgtccatcaaatctatctcttcgtctcgagtgttcgtcgatctatatctccaactcagcctgaacttatttctcatattctcgatcatgtgtctaatctcatactctcctctcacaatccaccattcataacgaccatatagcattggtattcacccgcccatccttcaatcgctgtagactgagcaggtccgcttcttcctcgccctcttttcatataccagtttcggaacaacttccagtcaatactggacgtgtctatggacaggccctcttgtccggtgatcgtgcgtatgtttctcagttatcggtggcccaagaaggacatcacttgatatgtttaggcacataaagaattgtccttctgtttgctaatgtattttttgggcaacacttcagcggccgctccttttcgtaagaacccagttggaatccaattgctgagtgcctacacgcggcggcaagtctgcccgaatccttccctgcccgacgtcaacccagaaaatattaatattgcccgaggtaacttgacgaaaaaaggtctccttagtaaactgcctgagccccaagaacccattaacatcgatttacccaagctacaagggcaaaacattgccgagcacttccataatttgggtgtagaggtcagtgcagatcaataggtgaagcgttagtcgcagtgtcaggctagctttctaactgttgttctgatccttttggattgtcattaactggaatacagcaatcagaaccgtttctttctctcgccgaaacgctctctcaatcaactgtacttgccgttccatcgcattttccagtcgtttcaggatggtccaagtacgatgcagagaaaaacacttggtcgcaagtctcgtatccagagggagagcatatgctggtgtttgatgtggaggttctctataagatacacccttaccctgttttggccaccgctgtatctcccaccgcatggtactcatggatctcgccatggcttcttcaggagtctgagaagaaggagcatcttatctctctcggtccgcacacaacgccaagggtgatagttggccacaacatcagttatgatcgggcaaggatattggaggagtatcaactccgaggtagccagaaccgatttctcgacactatgagtcttcattgtgcctctcaaggtgtatcggccccgcaacgtggtctctggaagcagcatcagtccagggtggccaccgagaacaccgctcggaaggagagaagagagtggttggtcaaaacgatcaaagaaactgaggaaagaatcgcaaacggggagatagtaggcgtagttgagcacgaaccagcgttggaaggagctgagcagtttttggcaactcctgtagaaggaacagtcaaggaaaccctaaatctgccacagttcctggctgagcttcggttcgaactcgatgatgctcctatccccgctagtacatctaccggacagaggctctctccagaggctctcggcgattcatctgaggaggacggttctctctcgcatggctggcaggatgtaacctcgatgaacgcgcttgaccaagtgttcaaacttcactttcccgacgagtctatggacaaagaccaaagagcagctttctcttcgactgatcctcaaacgatccgagacaatcttcaggccctgattcgctactgtgctacagatgtgcacgcgactcaacgaatctttaacatcgctttccctcgattcagacggctctgtccatcgcctgtgtccttcgctggccagctcatcatgggcagctccttccttcctatcaataagacatggtcaagctatatcataaactctgatgccaaatggtccgagttggacatgaaagtcaaattccagcttgctgctttggcagaggagtctagggaacaatggatcgagccacctgaagattggactcctggattactgaccctggagactgcccgcgctctttcttgtccgaaagaatttcagaatgacccggatctatcgcaactagattggactcctcgccctgctaagcacatccggtggagagccctcgctctaaaacaagctcttcttgaggatgagaagataaatggcgaatatctaggcgagctgggtgaagactctatcagcgttgccacgacaatcgaatcaccacctggtgttcaaaagcgcacaaggaagagaatcatagacgggc

SEQ ID NO: 3166 - DNA, 4375 bp, Xanthophyllomyces dendrorhous
catagacgggcggaccatgcctgatggcgtcgatagccttcgccgaagcaaatttattcccagactgctcggtttgacttatcacaacaaaccgattcattactcggaagagcatgggtttgtgtacgaaattgaagagaccaaagacaccaacaccgaatccactgaaatagattccagtgagccacttatcttcaaccatcccaacaaggatgtctatttttccaaaagagtctctcaaggggcagtcttccgacagatgccaagctcaggaaaaaaagcgactagtattctagggattacgtcaatgcggtcttcggcgatgtctagcgcgcttcatggaaccgatggggcggagaaggtcctagaggccctagacagtaaagccagatgggaaaccgtaaggaagaccttgatagcagcgttggattcgagaggagtagacgtcgtcgactatgatcgtatgtatctcctctctctatacctccagttcactactcatatactcatatcagcgcaatatgacctgcttgttctcttctttgtttaatgaagccatggtcaaccttccggagtttgatcccgctcaagcgatttacgatgttgaaagtacgttatgctcttttccttaatacaatactagattagttgagcatgcgttctaacgtttgtaaccggggaatatcatttataacctcctttgatattctctttcaattttaatagccggggctaaacagcgagaacaagcattcaaagcggaagaggaggatggtgatgaagaagttgtcgtcaccaacgaagatctccatatcccaccttcggcttccgctcttaacgccaactggtggccagcttggtactggaaactctttgttccaaaacaaggaaagccgtcgaacaatatgaacatcaccgtccgtagtcaaatcgcctcgcatatgcttcgacttagttggaagaagcatgcactatatcggtcaaaggagcacggatgggtctatcgagtccctaacgatggaactattccggaagatgatccgatgagaggtcgtgcattgtatttctccgctggcgagtcagcctactaccagcaaagagcggacgaagaggcccggattgccgagaacagaccgtacaagacgacggccgtcatcaacccagacgtcgctctgtacgaaattactcgagcgaccaaagaccttttcttcaaagttccccatcctcaaggagaaacccatcgacttggccgattaatcactaaaggctcggctaagtttttcgaggatgagacgctgacgagtgaccttgcattggcgaaggaggccattcagatggacatggcttgtagttattggatcagcgtgagagagcgagtgaaagaacaactagcgatcaaggagtcggacgacgtaccgatggggttcccactggagacgaaggacaacccagatgagctaggaatgattataccacagatggtagtgatgggaactgtgacgcgacgagcagtagagaagacatggctggtgagtgagcttgtgactatatatagagcttgtcgccgagattgatttctgatgtctttacttgctcctatcttagactgcttctaatgccaagaaaaataggattggttctgagctcaaggctatggtccaagctcctcccggctactcaatagtcggagccgatgttgattccgaagagctttggatagcaagtttgctaggagacgctcaactcggtttgcacggtgggtcccccattggatggatgactcttgaaggtaccaaatcgcagggcacggacgtccactcaaaaaccgcgttcattgtcaacgttacccgagatggagcgaaagtatttaactattcccgaatctatggtgctgggatcaagcatgcaactcgtttgctcatggaaggtcaagccgttcaggacgaagaagccgcaacgaaagcggccgaagctttatacgcatccaccaaagggttacgggttgcgtttaataacgccgactttcaccgattctggtttggtggaacggagagctacttattcaactcaattgaaagtgttgctcgaagtaagctccctcaaactccggctctcaagtgtggtatcactgccgctctgcgtggagcgtttttggaaaaaccgtcagatcacatgacatcccgaatcaattgggtggttcaatcttctggagtcgattatcttcacttgctcattgtcgctgtcaaccatatctgtgctcattacaacatcgatgctcgctttctaatttctgtgcatgatgaaattcgatacttggtgaaggacgaagataaataccgagcgacttatgccctccaggttgccaacctgtggacgagaatgctttttgccttccagtgtggaatggaggatcttccccaaggttgcgcctttttctcagcggtcgatgttgacaaggtcctgcgcaaggaggtcgacatgccctgcgttaccccttcaaatcctatacctataccttcaggagaggcactccatatcactaagactttggagcttacaaatgggagtcttcatgcagatggacagcctatgtcgatatggccctccccgccgtcgtctcttccgagccctgtgcctattcctgacaggccatacgttcaacctgtctctagagttaagaatcaggattctatctggaaatcattctatgttaacagtcaggcctgtgagagcgaagaagaagtctacgatctctggcagcgaatgggctcgccgatcgatcctgtcaaagtccaactagaacgcgctttccggacgacacggaacacggccggcccaaaaaactcagatagttctgattggaatcgtagaacggcgttctcaaagagctccaaaggaaatttctctaattggaagcggaacgctccgtctttctcgggatcgaagcctgccacgccaagtccccctttgcggctggtccgcgagactcgttcggagcaggatatcttgatggaaggatatgactactggatctctacccagaagagctatgccaatccttcagcttcgccactgccactatcatcctcagagtcgtcatcggcatcagcgacactcaaaccccctctgatgtcttttgccaatcgacagcgaaaaccatcatctgccgagtatgcggcggcaaattcgaaacgatcatgtagccaacgaaacgggggttggaaagaataatcctctgtctttcacggcctggttaagtgaaaagaaaaagaccctgatcttgctcacatgggatatatctgatagcatcttgcctcatgctcttctccatctttctttacaattttttatctttgccatgctccgcgtttcgctatcaaaagtatataggtatcattgtcggctccgttgtttacataagtattctttgatcattaacgatagggggttttggattttgactgtttatgtttgacccattcattgtatatgtattagcttttccttctttcttgatcttacaggatgtctgaccctcataggtctctatatatggaatttcaatgccaattctttaatcgttctttacgagagtgtcctgcctgatagttgtttgcttatcgataggaatttccattgacggagaaacccgaaggagaactatgggattgttcgtttatataactcatctatttccatgtattcagcccacccgattgtctctataactcttgtttctctccgccttcctcaagcgacgatcacgcacgcatatatctacctacataatgacttctactacaaagcaaccgctggagattctactagttggcttcggagcggtaggcgtagtgtacgcttacatgtttgaaaaggtatggcaatcatccatcttttcttttcttttcttaccgattttctttttcttcgtttcgttgaatgctgacaacagtagcttatcctgatctatggctcgttctcgtcttttagagtgctcaagctaaggtcacagctgtagctcggtcaaactttgagttgattaaccagaaaggaatccatatcgagtcaccgtcgaaatttggatcaatccctggctggaaaccttctcgatgtatgttttatcaaacatcttcgcatatccagcatcactggagaagctttaaaacaatctgcttggtctttaaatagtggtccattcggtagaagatgcgttggacagagagtatgattacgtagtagtcactacaaagtctttacccgatgtctatccggtcgaacggatattggaaccgatcatcaaggcccgaaaaacgaagacgtttgtgttgatccaggtgagtagttcccttagtatacaaacaaaatttgatgtttc

SEQ ID NO: 3167 - DNA, 15889 bp, Xanthophyllomyces dendrorhous
ggggagaacgagatcgacttgatcggaccttctgtgctagaatttgtcagttctttcttttcctatcacatgtttcttccttttatttctcggtaactttgtgttgattacgcaaatctacatttatacgaattctgagtagtgtaacgaagtcgccgctatcggatacaaggcaaggttgcctctgccagaaaactttggacagttcatctacgatggcacggtatcgttccgtcgagagaagggaggaaagcacaagccttcggcgcttgtcgatctagagaccggccgacctctcgaaattgaggtcaccgtaggaaacgtgttgaaaatggctcgacgattgaacatcaaagatgaggagatcaagattctcagattagtttatggtctgggcagagttttgcagaagaaagctctagagaattagctagttttcacaggaatgctagggaagatgtagaatgaagtgcaatttgatgtttttctccctatctgatattttggatttaagctcttgtgcaattctatatgacccactccagatagaatatacctggctgtggaaaatgactggaggcgagaaaacaaaagtgaatatgataaaaagaaaacgaagtagacaggattcgaacctgcgcgcccatagggcacttcctggacttgctaatatagcagggaagcatcgtaaccacttgattactactcctttgatgtttatctagcctcgggcagccataaaatctcgctggcatctgtctctcgtcgaggacactgaccatacagtaaagccgacgggcgagaacggcaccctttcgttctggcgcttgttcccggcccagtccccactggcttgccaaaccatatgcgcaccaaccaggtgtcacagtgagatggatcgagaaagaagaagaaccgggaggagctagcaggtctggtgactgcacggagagaaatgcttggggtctggcgcaagatctgagggtgttgcctcgaagaagaacatggcagatcacaaccgaagccatgtcaagacggccaaaatgatgatgtcttcacccggccatcaatcaagtcagggagtcctttgtgctggtcaatctggaaggttcacttggactcaattctaatcctctcaatgtcgagttctttcaacaactgattcctgaatcctctaatttatccaaacgagtatacacaccaacaaaagatgtagatgagatgttcgagagaaccagaaagggatacatggaaaccctagctactgtttgaaagagatcacaaaagatgacaaggcaagagaaaagaatagaaaagatagaccagtttcgtccttagtcacctagactgttacatctgagacctttcctcgctttcttttcttcttccaaatactacaagtctccctccgacttctagttttgcctttaatctcatctctcgctatctctacaactcacagggcttctcaagctatcctttctctcgcctgttacgcttgtctccgttccgctttaaatttcaagacctcccctcgataattttctgtctttctcatatcttttcgggtttgttttctcacaccggagcggtgtctcatcattcggactcataaataatctgaacgtctcatgtttctctcagagcagagctcctatctcaacgtcagtaatcatccgcaggttcgagttccgacgacgcgaacactcatctcttggaccttttctcagaggagaatgaaatcaaactgctacctatggcttatgttgtttattctgggatcacaaacagttgtatgtacatcagacaagatgattataggcatgaatacccacaaaggagagcagttaccccaaggtagagtggtcacgtcatctgaggaagcagcgtctcacggtttgcgagcgttgtacctctacgagtccggaatggtattgatatcgataaaagacaaactggcttattctatatggcccgatggccacaaaagggacaacggcgcggtggcgtggcatcattcgggatctctgtctgcaggacgaatcaacgggatgttcgagagcgagaacgacgtgaacactgtacgaaccacaagcgcgccaaaacatgatggtaaatctcagcatgacaacgcgcaaagcccaaagcgacgtcacaaatggcttgcaggcaaaactgttggtgcgggaccttctataaaggtagtaccgacgtgtagcgtcgattgtgacgcgctgagtatacaggggacgagcgtgggtgcgcacgactatatacgaacaagcacaatgtccataacagctcgttctcaagccatggacgatgaagggctgtgtaccgtagaattgtgtcaacagcaggagtcgctgacgatgtcgctaggcatgatccatgatgattccgcagaccatacacatacggccggagagtcttcgagcactgctggagataactatccactctacggcgcggtaagctcgacaaacaagatgaacagcttcattataagagtcatataaaggcagcacaggtagatgtcagggatgtaatttgagttacacatgatctataagtcctccacttgtataactttctcgctctgatatttcaacgcgctatacttacagcgcattcaatcggtattcgtagggtctgagaatcataaataagccggacgttctcgataacttgcagatgaaacgccaaagcctggattctttgttaccttctacttctttccttcctcgttctcctatccttgtttcctagcgattctataaatcttgtttctctattacaaaagccttctcttcctcatgaaaacctaagactccttatcccatgacctaagaggtttgggtggtttgtggtctgaaaacgcgccggttgaaaagagtcacgtatcaatcgtcatcggtagcagccaaagccatacaatctctgattctagtcaagtacccaaagcggacagaatcgctgcctgctacagacatttgttgctctctgaacgttcactgttctcccatgaggaccatcaggcttctactgatctgttcaacagccgttttgacgcgcgctcgctcctgaggtttgtctgggacgcgcgcaagaaatctggtgaacttgtctgggtgatacctgtatcaagaaatcatcggactcaacaagccaggattggttcaaatctctagaacgagagatgaagaaagataggagaagatctagaatttgatacggaccgacgaatcccttccctcaaaatgtctttcctctttctttttcgctcgtcctccgtcaggcccttccagccgacctggccgcccaacagaaattctcgcacagattcttcaatccagccttcatcatctcccccgatgcctaagtttttcccactcttgagatgaaacatcggccacgggatctccttgaatctaagtgggggagcatctgtccctatggaatctgggctactctcgagcaacatcttcttccaccgatcgtcatattgcgcccgttgagtctcttttaacacggccgcctcttcgtcgcgaacgtatctccatttttcgaattctttgattcgcgctcgttccaaccgatcgttctccacccgggttcgttccagtcgagcagccgtcgcggctgcttctcttgcgagagcttcctgacgctgccatgcgcccgaacgctcggcttgtcgacgagagattcctgatcggatgctggatccagtttccgtatatgtaagtagtggatatcagtggctcttccgatgcagtagggttacactttaaccccatgtaagacacacctttcaacccactcttcttcgcccatcaactctgtcacaagatcgccttgatcccacaagttgtcgctctctctaccttgccacctctttgggattcttgtttgaccaccgaaagcctcgtccccccatccaagacctgttccatatcctccgcctatctcccagtcccagagagatgaagctggtccctcgtcctgagcttctaaatcacgcagatgagcatcgaacgtttcttgaaatgcatcgggaccagaattagaggtatgatacgacgaggaagaaggagatgaacccgatcggtgtggtctagaacttctactctggcgaggaggagatgttgagtcgggtcggtatggacgaggaggagatgctggatagggatgggagggatcaagtgttggcgaaggcttctgttttcgagctcttctgagagcctttctatatgccttttcttctcgcttggctctctctttagctgaatctttccttgaagtacattaagacaatatgttagatgaagagacgattgtaaacatcaaacgcatacttacagattaagctttgttgcgtaggctgcagagctcgacgatgacatgctgatggtagtgaggatgacgatgatggtgggcacgtgattcatggtgatttggtggttcgtggtttgagagcgcccaagccaaaaaggatcacgtcgtggttgctttcgagtaaccaaagccatacaatctttgtttgtagtatagattcttaacctacactcacatctgattcgatggccgcagatagacagtcgtccgacgagttctctcaaggtcctccttcgaacctcacgagaaggcctcaatcatgcgcaaagtgtcgacaagaaggtcgaccgcctattctcagagcagattgtagggttcacaaaaggcaattgaagaaggaacacatgaatcatactttggctggacctggaggagcgggaagacgaccgggtttaagattcttaggtatgttcttgatcaagaatccttcgtagatagtctttatttcgcacgagttcggctgttacacctatcattctgagtatctgcttttgatcttacagagaacacaacatacacaaccttaatggcacccgccaactctgcctcatcctcgacccaatcagtgatccatccgctattatctactcaaaccggcggtccctcaactgaccgatcatcatcaagcttttatcttcatgatcccaggaatatgccgatggagtcgctcgaacgtacacccatgggcgccgagtcagccgaaggggcaaacgtcgatgatggcctcgtcagacgcgcatacactgaacagaacgacctctcccttggttcagatggccattctactcagagggacgatctcgagatggatgacggagggatgatggacggatccggcgatgagaagggcccaggaggaaaacgcctttcattaacgcaggccagaggttcgtttgagaattggcctctctgtgatcccgcgcgttacgtattgacatgtgtcttcgactgtatatgctcgacgcgtcgggcgtgtgaatagccaaggcttggagtactcctctagcagctgaggaatcccgtgctaagatgttcagcagccgttggagtcgagtggaaaattctgttcgtatattcctttctctatgattatgccgacctggtcttgatggatcttattcttgtttctgcgtatgggctttgcaggccatcgcccttgggcagtcgaccggtgcctacgttgctctgctcgcctggaggtgagtttcttcttctggtttctattttcattcgtggtccaagtgaatccaatgcttcgggaagcttctagtactagtcgctgaaagcgcttccaaccattctcttatcctctcaaatgaatagagacgacagggtccaaagcaatactcctacagcgacacacaagacgtttttgccaaaatcccacttcagtcaatcccttcaatcacttcctgacggaacgtccgcccgaatctatgatcactttgtgaacctcgtccgggagactcatccaaggttcatcgaggcccaacttgaatccgtccgtcgggaggcggaggagaaggtcttccagatggaagagagagcgagaatggagagagaggagcaggataggaaggtgaaagagttggaaagacgattggaggagtatcaaaaagcaggcacggtcgttgcttcgtcagcggcgacaggatcaagtaggcaggctgctgcttcagatacagtaacagccacgggcatcgtcgatgacaaggagaccgtcttaatctcagatgattcatgagtgttctctcttcctcttttttttgtcgcttgtacctcattgcgatagtcattatttattcgctctatacgatgtactgtcgttttttcaagacattgactaagtccccggaaaaaatctatacatgtttctgtaccatactgatgaaaacgtgtccaatcgactaataaataagatcaacttttcgaaggacaatcaatacaaaatcgaattcatctaaagatcaagccaaggtgttcttagaggatttctcctttttctctttcttcgctttcttctcttttttttccttctttctcagcaaaatgaaaccatctcccaagtcatctccggaagctgccacagtctctttaagcactggctcctccttctcctcaaccgccgactttggctttttccttggaatttcctccgacgaggtcgagatggaccctagcacagaagatgatgatggctctggaacacctgcgaatagccgatcgatctcgtccatctcttccggccgagtcgctttatctcgtttgcgtttcttgtcctttttgtccgccgagagagaggaggaagcaggaacgaccggcgtcgaggttgacgcaacgggagcgatgggttgaacaactggaacaatgggtttcacagaggctgcaagattagtagcggcgggcgtaggtcgaggagcagccgtctgttgggcgagccattcgtcctctcgtcgcttgaagaaaccaatattgacttttcgagcaaagaatcgaccatattgagaggaagacaaggtaatctcaaacggaacaagggttcgagcaattttggtctttaggaagccatcgcagtgcgcccaaagtttttctcctacacgagagccaacgcggtcatctacgagtccgtagaaattaccgaggaatgcaagaatcaccttccgtgagctcttgaagggaacagtgggtgaatcaacaatgacgtccaggaggcgagatgagatcggactgtgcgctattttgagtaaataatcgattggttgagctaaaagactattcaaatccaggcaaggaagcaagaaaatcaacgtcgaggttacgaaagacaaagacaaaaaacacttacctagagataacggtctcgttctcttgactaggcaatcgaagcaaactctgcaagatcagcgacccctgaatattcggtcccagcggatcagccgtctccgctacttttttcaaatgccctagccgcctcttagcctgtagagcctcttcttctgtcatctcaggctcagcctctagcctaggctcgggttctttccatcgatcttcctcttcctcctcctcgacttcatcagcttcttctccttcgggtgcagggattccagcggcttttcggtagcgcttcaaaggcttaagagtcaggacgcagggaacgaggaaactctcatctcgcggtcgctgtatctcgaacgattgacaaaccgtgtcgagcaccttgtctccaaggacttggagatcggcagcccggtcaatgaccgctttgatcacgcccgttctcgctcgcatgacagctcgtctccagtctcctttgacctcgtccaatagacttgctagctcttgttctcccaatctcgtcaccgccttagcaacgacaaagttggcaaccggatgaacacccaactttcccattctgccgacgaaataagtgctccagatagaggaaaatactggatcaggtgcaacgcgaaggagaagctcgaacagatgagaacccgtggcgtctcgaagcaggagctcgaggtaatcggatcgagaaggtgcttctgatgattcgtctgttgaatagatcgggaaaagctgtaagcaaaagggtcgaaactagaacagtaaaaacggcacgtacgcagtgttgtgatcaatccggacagagcagtgtccatcaaagagcctttctcattcgatgcgcccccctgagcttcaagttcaatcaacatctgaattaccgggccagcaacctggccaactcctagcgccctgatttcaacctcgccaacttttcctcggatagcaccccagaactctgtaatcaaactgttgaaactatcagggaccgctcgaagggttccttctggtgcgtcggcaccggtctcttcatcgttctgaacgaacgctttgaagttagcgttagactttgcgaatttggtggatcgtttggaacggatcgcggaggattgggaggagggaccgccagcggtatgagctgaggggataggtcggcctgtaagtagcagaaggagtactctgatggggtgagaagagaagggtgattggatcaaagtcgggagtaaaggaagaagctcttgagcgatgtcgtgaatctgagaagacattctgggaagaacgccttcggacgggtcggcggtttgttcttgagaagggaagacgttacgacactgcagatgattcaagttgaacaagaaaaattagttcatactgattggctttgtaaaagaatatatgtacggatacagaactccgtacctctcggtcgatcgtcaatgctcctaaggtaaacagcgtctgaacaacatgacttccaaatctatgttggatcaacttggcgtagctaaaaccatcattggaaatcaaattcaaattagagaaacgatactcgtaagtgaaggtttcgcgggaggtttgaataaaagcaaaagcactcactttcccatcagactatcggcaaacacccttcgaccaaagtcacccatgttccagatcattcgctcgagaacgagagcacaatctgtatcagtagcgagttgaagctcccttgatcgaagctcagacaatgcagcggtaaggagcaaatggcgatctaagatttaggtaagaacagaaagattttggttcagttgatcgaatcggtcggccaggctgattcaactatactcaccctcattctcttcgtcggcgtcttctccttgaggaagcccaaggtcttcaaacactttgagcttatcatctactgtcttgaagtatgatttaacctgtttacgacggtgaccaatcatgcgcaaatgttcccaaaccaagcgaattgtcaggctacatggattgacaaggaatattcaaagagaaagataggacatacctctggatcaacaaatccccagggggcgtccccttcgattcgctctcggatagatcccagccctccatcagagggtgtaacccaatcggcttctccaccgaacatgtttcctattcgtcggccagagggagcattgtcttgggagatctggttagattcctcggtgggctgctcaacatcttgttgctctagcggaacgaacgatggggcaggcgtaggctcaaacgccttcggaatcacatcatccgtcgtgttcttagcctttctctttcctctctttctaacgagctcctttggcatggcagattgttcttgtggaagtgttgaatgagtgtgagcgaggattggagaaaaacaggagtcaagcgataatagaggaaatctcaaatttcctgaatcgaaagctgtgcaaatcattagacgcgtctctattatatttcgttggaaatctctctaatatagtaggagtaaactgtattgtgtgttctgtattgaattcctatcagcgttccgtacgttcatttgatcatctccttcctcgtccagacaggtccatctcttcgttgatctgatcgactcacctccatccacagattgcatctttacctctcatggcattcctaaccgctcaacaacaaaatatggcgtctcaagcaactaccccgctcagtacccacccacctcaaacatcctactttcttccgcatatcacaacctcagcttcggcctcagccgcacaggtggcgggattgcagcatccgctcgcgttcaaggaatctgaagtgatcacgatcgattggaaactgacaaacttgaaggctttgtttgagacaagcagaggtgatagtaaatctagggtagtcaagagtgtccttttcggaggagctaggtggcagcttttgtacgtcctgcccatatattgtctcaaatcgccgtatgccagctgactcgcgaccctacaccagattttacccaaatgttggtcaccttcaatcatattcacaaagcaattgagatcgcctctgtaattcaatgcttttatctttcgtattaggctggtggaggttctcaagactggtgctctctgtatctctcttgtgaacctactcttgacggtcagttctgttcaactcttgctgtcaactttgatgttctcgcaactcacctttttgcaaaatccaaaccttagagtatgacgaaggcccacctccaccaacggcatccacttttggacagacacataccagtgcgcaatcaaatggcgcaggaaagtcttggtctcgaaaaggagtttaccaattcaagttcgcgatctgttctgacgaaggaaaggtaatatgtgtcagggaggcaggtgcatatagcttttctactctttgaccgtcgacaaagccataagatggcatgcgcgctgaaacgttcaagccgcttgcctttttacaaaacaacaaaattaagctgcggaacacgtaaggttactctgtatcatctcaaaaaatctatgtttgactgctttgttgaacccaaccctatgacttaaatgaatattctcattttcatcccaaatatagacgttctcaagcaagaccgctagtaagtcaagacttcaagtctgcatgaccacttcagagtgggtagcgctgaccaactttcactgttttgactctctcaagactggggggtttgttttatcctctcactacgtcccttcgctactttctcattgattcagagaacctgatgtggtatatgtgtctttcggaaacagtgggctcaatatgctaagcgtgatgtcgtatactatagtacgcacacgtcttaatgaacaggttcttcgaggtgtcattcacttcactgacaagatcagttgtctttgtactgccactataatagatcaacctcaagtaaaatctgcagatacgttcctgatcacctgtagcatatccaccgttcctgcgcctcccaaaccaccaagtactattccgaaacgaaatgttcctcaaagtcttttgctggttcgtttttagagtctttcgttcaggatctgcttaaacaagaattctcttgttcttgttgttaatcatgaacaaaccggtcttcttgctattctcccttcgcttcgatagtcggtgggacgaatgttaaatgatccgatctacagtgatgtcagtcatcacatgtcaatttatcttttgatttgaatggtgcatctctgattgtatcctttccgatcctttgaactatatacaggtcgagtttattcttccttcgagagatagatattcaggactcaaagagaagcgaaaggtgatctatgccaatcggacactattgaatagatcagatgtacgtttctacaccacttctcgttcgcaagccgagttcacccgtgaatcatctatgacattcaagctgacagcccaagagttgtatcaaacagtactttgaaacgatgctctcttcaggcttcatggaagggttcaatcaagaagaagaagaatcgtccgtgcatgggagtcagactgaaaccgaatcacatgtgaacactttttgcctgctccttcttgcccctgttgccagggctaactctgtgttttcgggtctttgttcaatatattacgacagtctgaattcttagatccaccatttctggaggattctgattcatcagatttgtcgtctgatgaagaagaggagctggagaatgagcctcatggatttacccaagaactctctgcagtggcatcaccgtcctcttccccttttgctttctcaactatcgcggcgcgcatgacgagcgactcggatcagccagcgcatgctgataggtcggttccagagggtgaagggctcgaagaagctgcaaagttgaacccgcatctagatggattagtcgaaggagagggcttatcaaagaaggaaggtctggtagattcaacgaacaaaagcactcatacgaagaagcgtgagcgatcgaaggataaggaaagggcggggcatattcttcctgggcctcggaagcgtagagtaatcgttcgagttgagttctgttccttttgcacgtacatacgaggtgttcaaacgttttatctgacgcgctgtttgtgtaatgcatctgaccattcgaaattactgcatgctaggacgcatcctacccgactttctatgctctcttatactatctgtacactgatagtatcgcattcgcccctttgacctcctcattcattcctttatcagctgtaaccaatcatgttgacacgtcaggagctaccgtgggttctgcctcatccgaatctcatccaagtaagctaagacgtctgtggatagaagattggtcgaagatgaacccagagagaccagagccagtgagcccgaaaagtatgtatgtcctggcagacaagattgggctggaagaactcaaaagtttaagcttcgaacgtaagttgccacctagttgatttcaccttagacaaatgtgttctgaataatgacaaaatatttcttcttccctgctactctctcgttcatgtgccaaccatagacataatcttgaatctcacggtccagaacatcccgcacgagtgcttctccgccttttcagcctcattcgacgatgtgcgaaagacacaagtggctttcttcctgaaggtccgtatatatccatatcggttttcaaaaaattgtctactatgttcattctttcttcaaatcaaattccgaaatgtcactcgcctgatcagaactgggctgaaatcaagcgaacgaatgggatgaaaattgtttgggattcattacggtctgggaaacatctagggttcgaagaaggtctgtacaagaggcttgaagatttgccttttatgattctcttctcaagacgctgtctaattttttttgtaatctgcttttcacctttacagtctggcccttgatcgtctctcagttggagtatgtgccattggctctccaggaccctgctggccaggctgctgtatgaacgaattcattgcctaggactctgttgattaaatgacatttcttgaagagtaatcgatctgccatatgcttgtagaggcttctcgatcttctgtgttctgagcagccggttactccgttcgatgatgagactcatttaaatgagaacgacgcgtttcatgagacgcgtcattcacgtgtttgcttttctcagtgttcagtctcctgttctcatgttctttactttgatctctcctgcttccttagatcaatcatacctcgccacccctcttgttactctctatctagatggctcttcctcgctcacatcaaattagcttgacgcctcatgagatagaatttattgcggaagagactgaaattgagatcgtgcctctgttcggaatggatcccatccgactcctttccgtaagtccgatcgtccagatatcatatctctgcgagttagatcttgttggctcgtcttttgccctataattatattgaaccgagatgttgagaaaaacgaaatacaggggatatatggtccttttagaccgccacaacggacaaaaataccattctggctagctatcaacttgaaagggaaacgaaaatgccatatcctacccccagagtggctgagcgttggtaagtctgttccctctacagtataagaagcttggaagagaactatccaatctagaaaagtcaaacatatactgatcttgtgtggtttgctctgtattctatttctctctatatgattaaaatgggtttgacattgggtggtacagattccctccaggcgttgcttgctcacgaatcctctttgacgagctcatttgctcggttaccctccagacaattttccgaaatttctaaaatgcttttagatgcgtaagtgaagtctcaaccgctataaccttgctctcttcttcttacctcaagcccttcctcaatttaaaactaattgcggaacacataatccgttctgattgtccttcatcgatcggatgaacaaataattacagagcttctgataatttggtaaacccgtcacagatcaggtcacttctaaaggatattagagaggtccggcaagcaaaattgaggactggtataaaacctacgataggcgaggatggaacaggtcttaacggagaatatcttcaggtatgtccaaaactatttctgtctggattgatttgttctatcgattactgacgtgcacttctatccttgttcattgatttttttgctcttctttccactctgctgctgacagttgacaaatcttacccctttagagatcaacgagttgaggccgttctttgtgagagcaatgggtgtgatgacaaaacttagaccgccggaaccggaagcacctgatgaccaggcagacggtcctggagaagaggatgaggatgaggatggagatctttcatactagagatgcccttgatcgaagaagcaaggggcaagcctgagaacttttgttgtactttataagaaatgaatgagcgtcgctatttgagaatagtcgtttttgttgtagtcggacattacaaaattcctctattaaactggaaagaagactatggtacttttcccctatcggcccgcttcgtcctcccttcctcctgtccatcactcaagatcttcttttttaccatctgctcgtctgcctttccccgtggtgtgaaactcaatccagcaaccgtacatcatatattatcatcatggtcttagccgatctaggtcgtcgcctcaatacggctatcaactcgctctcctcagccaatgtggtggacgagaaggtgtgtcaatcagagtgtcgggagctgttctatcttggttaaaagcactaagttgacctacccttcaccttgtcggatcgctcgatcatccaatttaggctctcgatgctgtactcaaggaagtctgtgctgctcttcttgaatctgatgtgaacgtcaaactagtggccgctcttcgaacgaaagttcgctccgaagtacgttgacagcattcctcgtcgtcacagatcatagtctatagcgaaacgagagtctgccgactctgaccttcattttactgaccgactccctccctcgctttctcctattttcttcttctttccttttcctttcctttcgaaaaactaggtcagaccgctgctaaacccaccagcacctcaaccagctccttcgccatccaaagcatttcaaattgttcaaaaggcaatcttcgatcagttggtgttgctagttgaccctaataggaaggaaggcgaagaagaaaaggaagaggacaagggtggattccagtggcttcctaagaagggaaagagcaatgtgttgatggctgttggtattcagggagcaggaaagacgacaacgtgtactaaggtacgtgagcgataagatcgcgtctcgttcaatcggatgtatcttcagctgacgactttcctctctcgtcttcatctcggtatgcttcgcccttagctggctgctcattattctcgaagaggtttcaaaacctccttggtttgcgcagatacgttccgagcgggagctttcgatcagctaaagcagaacgctaccaaggccaaaatcccttattttggaagctatactgaaa

SEQ ID NO: 3168 - DNA, 10863 bp, Xanthophyllomyces dendrorhous
tgaaactgacccggtagaaatcgctaggcaaggagttgttaagtttaagaagggtacgtgttctcttacaacaactctataccttgcctcacgcgctcgagaactcatttgctcagtcgtcgttatgatacttcagaacgttttgatgtgattattgtcgacaccagtggaagacatcgacaagaagcagagttgtttgaagagatggtcgccattggggatgccgttaaacctgttcgtttcttatctgtcttgttttatactcgtcattggcccttcatactcgaaggctgacttgtacgtcggttgtctggatgttggcaatgataggatttgaccatcatggtgctcgacgcctcaataggccaagctgccgagtctcaatcaaaggctttcaaagaatcagccggatttggagctattatcgttactaagctagatggacacgccaaagggggaggagctatctcagcgtgtgtccttacatatttcgaggacgctcaagatgttgtttgctgatgctggctaaactaccctgctcttgtctacgtcgacatcttccttcttcttttatagagttgccgcaacgaagacgccgatcatcttcttgggaacaggagagcacttgcaggatttggaaaggtttagtccacgaccatttgtgagcaaactgcttggaatgggtgatatgcagggtttgttagagcacatgttcgtacatttatcccactcagccaatcgctcctctcgtaggtcatttctgatgtttacatcttactccgacgcgttttttcttcccataaaacgtgtgtcttgcttctttgaatcgtttattgtggaattaaacgataattagtcaggatatccaaacgatcaacccggagaagcagaaggatttggctacaaaatttcgatccgggaagttgtccatcaaagactggagagagcagatgcaaacggtgatgggaatgtacgttcttgtttcggtgtttttttttttcatcttatgttaagttaggtcgaatactatattgtctaatttctaatctgattctgcatccgaacctctaggggttcattgagtaagattgcttccatgattcctggattaccggctggtcttctagatggaaacgaggaagaggccggtaacaagctcaagaagcttgtgtttgtgacggatgcgatgactgctcgagagttggattctgacggaagttgcttcgtatgtattctcttgctacgtcacttgtctttgttcagtcacgtttaatcagaacaaaggtgactgacacgaatctgttgtcgggggaacagatcaggaaggataaggatgggaaccccattgggtttactaagcgagttgtaaagattgctcaaggaagtggtacgagcgtgagagaggttgaagagtgagtataacgtttgactgagatcaagtcatttgtctatcactcctgactaccattatttattttattttattttttgttgtaatgacaatccttcagtgtgttaatgcaacaccatatgatgtcgtcaatagctaagcaggcaggaggagcggctaaagccaatccgttagttttcggcctctctttctcttgtttcttccatcaacaggcagagtgatatttcttcagttctagagtgtcaaactgatgaaatgaacgacttgttccgatgattaataggaatgcagctttagcggcaaaattgacggctgctatgggtggacctccgttaggacctggtggacagcctagtcagcaacagatgcaggccattcaagtttgtcttttctttttccctttcttttcctgttccttcttttggatctactaagtgtgtccgctgattgttttgttcttacttggctttgcgttaatcggggggaaatagagagctatgcctcccgagctgctccgcaagatgcgagccgctggtccggctggtgctcaaaagtatgtgatcgtccttacgtggccgtttctgctgacgatagaaactgacttcgtcttgatgttcgaatctccagaatgatgaacgaaatcatgaatggcggaccgcctgctcctggagctggaccgcccggtggaggcatgcctggtttcggagatttgatgaaaacgatgggtgggatgttcggtggtggaggcgccggcggtggagggttacctggaatgggagccggagggatgccaagcatggcagatatgcagagtacgttcttgcctgtctctctctctctcttctttccttacaattcgatcgtcctctagatagctaatgatgtttttttcaaaccttattattgttcttgtcgatgttacttttcgtttgttccttcccttgtagaggccatgcagatgatgggtggaggagccggtggaggaggaatgcccggtacgatacgtttttccttcttctctttgaccttaagcaaccacatgtcatcagccctcttttttttccaaagaaagaaactcacgcttcgttgctttttatcattggaatttttatcattggaatcagatatgagtgcactcatgaagatgatgggtggcatgggaggggcaaagtaagaggagacgaacatgaagaggaacacgttgtctttacttgtatcacgttctttcgaaaaggggaagagaggtctatattcattcggtcttgaggacccttcctcgtcttttccgtttaatcattttcgttgaacgttttctttccgcctctatgagcttatttttcttgtaggaataatcaaaacattaaatgcctcttcgcaagattattcaagcttctgcaaacattatagcccggttgctttctcaacaaggtttaaaccaaataaatcaagggaaagctagcatttataaatctaattagaatatgtgagggaaaagaggagcttgataaaaacgagtatacgcagtgatagtattcaagagaggctgaaggatattgaagaaactcatatcaaaagggaagaaagtttcggaaattaataattccaagaccagagcaaaagacaagaagacatgaccataaaaaaagagagaaatcattccaacttggcctttctcttgggtcgagatcgaagccacatgaagaggtagaccaggataaagaagaagacaacatagatgacagtgattccaatatcccgacctccatcggttgagttgctcaagttaacattcgccaaatagtcgttaccactcgagtaggcgcaaacctcgcaactggtagtcgatgtcggatcttttatgtaaccaggggcagattcgaagaaggttgcgagatagttttcacaggtctgaccgcttggaggcgagaagacggcgtactctgaatccttgcatacgacagggatatttcgcatggcaaagaaagtttgagcgccgagaatataggtccaagggttgaggtagtacaaccagtatcgccagaaagcagtgatttgagcgtagggcaccaagactcccgagaacgaggcaaagattcccaaaaagatcgggttgaccagagctgcttgttcggcgttggccacgctagcggcaacggcatatgcgaatccaatcgaccagaattggtagagaatcaagatggcgtacatcggaccggcgtgctgagcatcggtagagattcctacggggaacacgacgaagtaccaaagcacgtagaacaaggtggaactgacaatcacccaagggatctcggcaatgatctgggcgacgacgaaaggctgccacgagtaaatcttggaaggcttttctcgagcctcgaagagcatccgagcgtcaataaaccgaggctgaacctgctggaatactccgggagcctagagccgtggaagagacaggtagatagttggttgaaaaggtcagcaacagacatcaaaaaagggtgaagttcgttgggacgtacaacaaacatggcctggaagacagagaaaagtctgttctggagcgaaatgaccgagttgtcaagctgcaagaacgagagcgagtttagtagggcggatccgacgtgaagcatgattttagatatgacatagtctggggatctccacatggcgacggtagctcgatgaattagggtcttgtactggaaggaggcgctggcagcgtattcccttccgtcctcctcgaacgatggaggcttgctagcacattcctgcttaaggtcggcaacttccttcgagacgttcttgtattcgtcagactcgagccaaaccttgccccaatctcgtccttttgaaagagagccagagacaacgtcgatcatgaactcggcaggattggcatcctcctatatgaggaaaagtatatccataacaatgagaacaaaagattgaaaaacgagacgaaaggtatgcaggacgtacagggcactcgattccttgtcgggcaaagtacgccttcatttcggaagcgttgtcaccaaggtctccgaagtagacggtgtctgtaaagaagagacaaaacgactgtgagcacatatcaagccataacaaaataggatcttagtactcacgtccacctcgggcaagaagtagtaatcgatcaaactggtcaaagagcaaggcactgggctgatggatggtgactagcatggattgtccagcgtcggcaagttttcgcaagaatcgcaaaatgttgaaacttgactgtccatctaaacctgaagtaggctcatccaagaagagcaaaaccggcttggcaacaagttcgacaccaatcgttaatcgctttcgttgttcgacgccgagtccgacattgttgtttccgataatggcatgttcaatgtcggtcaactcgagtagatccaagaccttgtcgacatacgctaacttctcctcccgagacacactggccggctgtctgagcaaagcagagaactcgagagcttctcggacggtctgcgtaggctcgtggatatcgacctgggaaacgtatccggtagttcgctggaaggaagctccaagaggtcgaccatcaacattaatatgtccctcgacaacaccctcctcttttcgaagagctagcacgtcaagcaaagttgtttttccagcaccggatgctcccatgagcgcagtgagcgttcctggtttggtgtaaccctggactccggaaagaagctgcctgtggccacctggaacaggcacggtgtagtttagttcgtcccaagtgagcacggtagtcgtcttggttatcgtgtcttcggccgttccgttacctctggtggtcttgccatcttcgatggccccggcaggacccttctcctcatcgacagcagcagcctttcgagcaatgggatcgtcctttttgttcttctgtcgctctgttacgagaaaaagggacagtctacatgtcagagaaagcggtatgaatgtaagaaaagaaggctagacactcactgtagagcaggtacgatcgttcagagccttgagccttgagcctttcgactccccatgcggtgatagcgacaaagaaaacccaaagaccaatacttcaaaaaatggataggtaaattcaaatgtcagactcaatctccttcaacaactcaagagagaatatttcgagaattacaaagaaaaaggacatacacgattccgacatttcgccacaagtggctatatctgtagttcaagccggcctgcaggtaggcatccccagtaacaaagtcctctccagtctgacttccctggacagtacacgcaaagtgcccatcgactccgtagaaaggcacaagtgtggtaccaacacaatcgaattgagtatcgtggaactcgttgaccatggcagattcgaacccgtagtacaaagggttgatccatcggacccaactcaaccaaggcttcatcgatgtctgagggatcaagtaaccggtgtagataatgagcaaaccaacagccagaccagacacctgtgaggcaccatcgaatgttgagaagttgaaaccgatagctcggaagaagccgagcaaggcaagagtagtaacgtaagtaatgatccagagcgtgaagaaggccgaagcgctctgcctgagctggcacatgaagtagactttacgccacagacggatgagttcataattagtacaatgtgccagatgtggaatcacaagcttccttgtgaacaaacgggaggggtagacttactaggcaataagaaggccgagacctgagcgataagaatagggaagtctgccaagacctgggcgagaacgacggctgagggcctgtacatggcgaaactcttgtgctttgcgaggatagttcgaccggtgaaggaggtcgtaacctctgtcattcctagcaacgcgttgaacagtaaaatgaagaagagggatcctcctcgagtgaacaatccggcagtggtctgaggaaggttgtagaacaaagaaccaagaatgatcgattggatgatacacgatccttgcttaatagcgatcgagcccttgtcgttccacatcagctggtactgtcgaatagtacacgccttgacttgggtccaaagtccggttgagtagagcgagttcttgccagcgctggcagatttctcctcttgaacggccaacttgaattcctcagtcataccattcagtcgctcggtatctcggaggtggtcttcgagctccttctcgctctgcttgtaaatgtccgaggccaggtaggcggcaacaaagtcgtctaccgtctggggcacgtctcgtcggtccttgtcaaacagcattcgctcagtcttgacggtgactccggtcaaatagtcggccacattctgtccttgcgggcacttgaaaccgaggttctcgaagtagggcttggcggccgctcgaggtccccagtagatgcattgtccggcggcgatgaccatgaccttgtcgaacagttcgtaaatctggttaccggcctggtagagtgaaatgaaggaggtggagccgagcaagtcggtgattgttcggatggaccgggtgtactctaacgcggtggaagcgtccagtcctcgagatgagttatcccaggcgacaactgaggctcggtttaccaagacctcagcgatcgacactcgcttccgttctcctccagaaacacctcggacaaactcatttccaaccagggtgtcgtgggtgtgttcaattccgagagtcttgagcaaggctgaaagaagctcttgttcgtactgctctcgggtttggccctccggtcggttcgtgggagtcttcatcttgagcccaaatttaagcgtctgaccgacggtcaaagtagggtagtgcgtatcactggaagacgaagagtagaacgtgtcagaagagagccgaacgagattgatacaggaaacaaacggcacatactcttcggcattgaagacaatgtttccggagtacttctcggcctccttgtggtccatcgatccgacaaggacgtctccgtcgactccggcatatccgtttcggatgttggtcaccgctttgaggaacgttgtgcatccacttccaggtcgaccgatgacaaatgccatctctccggatttcagtactccgttaaagtttctgatcaagactgttcgtcagaaggaagacaaatcagcggatcatttctttgaacggcaaagagaaaacaacaatagagacgaacacttttcattcgtcttgagagtagagggagcgttctccaaattttcattagactggttggctgcttcagctgcctttgcctgcttcttgtcttgaatcttaagcatagggttgaacatgctggaacgaagaagcacaagaaaacatgggtcaacacatcgatcaacagagagcgcccgagaggtaatgatgagtagcaaatgaggaaaagaggggtaaaactaacctgcccatggtctcggcgtacacagcagaagccccgactcctcgaaccgccaagttcttccaagcgacatcaagtttcttctgctttatgccatcgtcccgtctggaggcgagcgctccttcgaggtgcttcgcaagggaccaaggctcctcgctgtgtcgagaaccagtaagcgacctttgaagctcatggaaggccggatcgttcttgtccatcggctgtccgacatggatgctgaaaagtcggaaaaaagaaacatgaacgaccattggttaatttggatcgagagtagagacctagacagagaactgaaggcggacgtactcttctccccagcaggatggggttcgggtgagctccggctttgtaccggcctcaatatcgtgtgataatgactggtcggtcgacgtaggcgcagggttcacggcggtctgtgcctctgactgtgaggaagctctgctagtggaaacgttggaagactgggaatttggttcaatcgcgatgttgtgttcgcccacatccggcgttggtggctgtgcggccaacggcggagcgaacccggtttcgttgacggaatacgacatgaagaaagtattaggacctagggtggagtgagacgggaagagatacgggagaagatattctctgagcgaggggagcggcaaggaacgctgtaagatcacaaccaagaggaacaaggaaagaaagaaggttaggaacgacagtgacagcaaaaagaaagtcaagatctcgatctcaagctcggccaacaagtattccgagggatatggaacagagtactggtacaagagagaaattcccgatccggcaagccaagagtatctttctgttttcttgcttctcctcttcttcttctacttcttctcatccttgatcaagaaggaatggggaagagagcacgaacctagaagcacgttcaggagagagagagataatatctacaaggatatctgtcttgaaagaaacaagggaaggaagagtgggtgactgaaggtgggaagtgagaagaggatcgaataagaatttcgttgattgctttaaaacaacgatgtttttcctggcgcggctccggtgatcgtacgtgttttcttttaatgacttgactaaaaggaatgcggcacgaagccccactgcccgggcatccggtcataagcccatagtagtcagctctcccaatcccatagttctgtagttctatgggcccataacggtgtattgaactcaacgtcggccatcctcttccctactcaactcatttcatccttctttgatttctctggcgcttacgatgcttttgcgatgagctgtgacattctagtgttgactcggaaagcgatcgatgtctcgttttcttggcatacatacactttgtcatctatctgcgctatcatctcattctgggccgtgttttgttctttcggctgtgtcgaaatcattcgatgacatgataccaagtatacatccattcgcatacaccgcatatatcaaatacacacttgtcgcaaaggtagtagtttctacaaagaaccctagacagaaacgaccagatgaactcctatcctcagaaaactgtatgattgtctgattgtccagagaacgtcgccacatatgttgtctgttgtctttcgttccatgctcagaagacaatcgggaaggccatcaatctgccatagcccgtatctgtagggtctagccatggacttatgaattacctcctcgatgtgctgtcatccgaccacacgagcatgacagtgtggttcggccaggctccgagcaggcgaagcgaagcgctcggagtttgaaactttccccgagtgcccagaagattatgtcatcacttcttacgctccaggtgttttcatcttcatcatccatgcgtccaaatactctttatgacgcgtcacttgttataagctccggccggctttattctcttctcatcaagagaggtctgtggctgttttaaattcagtacaagattgagttacagcagacaaacaagaactgatggtcgtcgagagaagaaacaccacagcgatcacgacgacagcgacaaacattgacaacattgataacgaagatattgaccgggaacggaaagcaaaacaatagtctagctagtcatccttgtgtacaaaaaaccactttgtttcttcatccagctacaaacgcctcggctggcgtcgatcggcctttcggattgccaagttcttcccaaaagatttcgttcatccgttcagggttgtctaaatacacatggtgccctgcgtaagagcaaaaaattctcgatcagaagtcttcttctttctacgttcatctcttgccgagacaaataaggaaggggcgaaacaaactgtacctgcgcgttccacaacctcagtggacgtctgtctgttgccacgtgattgcattcgtctgcaagcctcaacaccccctttgaagtccatccacttttcgttgtatgataaacacagagtcggaaggttttacagttcagtttcgatatggaattgacggtttagagaaaattgtcagacatacgtctttatgtccataaacaaatttcacaggactgctcataattgacataagacaacaggtgcaataggtcagtattacgcacacacgcacacgaatacgaatacagagacaagaccgacatcttgatatcatccatccgttctactagcggttttcgagcaaacgctccaggagcaagtagatggtgaatacagtattctcccttttgataggatttttcgatatcaggaagtcaaaagtatttctctcaagtgtcagttcggcttttctttcctaaaaatcgtcgaaacccgagtctcaacggaaagacttacactccctttagcggtggtggtggcatagatgtaagcactaggaagattaacacgaaaagtctaatgagcaaacgacgatcttcgaaaaacgaaagtgcttgagaaccacagctattaagg

SEQ ID NO: 3169 - DNA, 24715 bp, Xanthophyllomyces dendrorhous
agaaccacagctattaaggaaaacaattaacgaaactgcatatcccgaatatcctcttgggagagtccttcgaatcgcctggaagagtacgctccaataagcttcggagccaacgggccgagagctttgagaatagagcagacaactgttagcttgagaaagcatagacaaaaacgaagatttacaagcttacatcgaactacagaaaatggagaccatcccttctcccatctgtaaaatcagaataccagatcagaatcatcgttcgcttcaaaaggcatcgaaactctgctcaagtagagacagcatgtacgcacgcccatccgaaaacactcctagcagccgattggctctgtggaactttctcgcccttctggtcgtttttttgaggcgccttcatttccttcctgccctcactcaattcagattcgatcgccccggcagccgcatcgacatctgataccgttggcgtaccctgagtactgatcttggagggtgttaagggcgcatttgggttgatcggaattccagcaggcgagatcagaatcaacttttcgactcgagacggatacttcaacgtatatgctatattcgatatcgatcaacgttcttttcggtcagcgcccccatatgaattcgattgaacaagatcatagatcgcgccttcctcgcccccagacttaattagagacgaaactcaccagcggtgagatagcctcccaacgaatgtccacaaagtaccatcttatcccatccgcctcgctttcgccattcttccaaactttccacgaaaaagtcctctgcattcttcactcgttctgccactctaccttcgtcattctcgtcgaccgatcctgatgccgatgaaggcaagttgaatgccttcggtgacggccgggaggagagacccatcccaagccagtcgagcgcaaatgcccgtcggttggcagacgcagaagcttcaccgaacgctgtcaaacagatcgatataaaaccaatcaggacaaacatcggtaatgacaaatatctctgcaaagattacttgccttgaagatttaagaagaagaacccaagcgcagctccatagccatgaagcagcctggccgaaagaacgtaaagattaacgaaccttggtcaactaatgaaaattccagtacactcacacattaactacgcctcctttttgcgctttggttcccccgtcgccaacggtataaaacttcagaccgtgtaagtacttttccgctggcggcttcgttttgtaaagcgggagcttccacgaagaagatgacaagttcgcttgggttgataaaggaaattgctctaatcttgccactaatgggttggacaatagtgctgtaggtgtcggatcgggtaggtctggtgaatggatgaacgaagggagtctcctgtgaagtacataagtagataatatcagttgaagaaaacgatacgaatcggagcgaagaaaggaagaaaatgcgtgccaaccgaagaagcctctcctccgctagactcatttccttttctctagagaaagaccaccaggcagccagactctgaccgtacgtcgttggcactggcctacttggagtaacaggagaatgatcgggcaacgaagctgtcgacgagttagcagtggacgttgtattggaggataggtgaggcgatcgctcatcaggcagatccggcagatcgttggtcggcagggcagacatatcggttatgctttagggaaaattcactctgttgatccgctgttgctgccgtggttggttgtaagaaggatgacaatcggataaattggggaagagaagaaagtggaaggtacataagctgatggggagtgcgacaaaggtgacgtgttctcggcttcaccctacgtgttgtaaccctaacattcccggtcatcggtcatcggctcttcaattatagaacaaagcaaaggtttgaacttttaaataacaaccgattggtaacaatagggacgaacctacacgcagtcaagagaggaaggggtataagagaacattgatcgatgctgtgtcttttagttggaatgtgcagaagaaagtatgaaaaaacagaaagaaaaaactctgaatgcaattaaaacatatgtggcatgaacaattgtatatatggggctgaagaagaaaacacaacaagttagatggaacgaaaaacagtaaacagtgaataaaacgagttgatcggctctctaggagtaagagatcgaggcgaatactcaaattgcaggtatatgtcaatgaatacgcgagatgatagcaagcgaaatgaaggtagaaggaacgaaaacaaggcgaggaagagaggaaacgggaagattaataacccttcaagatcaagaaccaacatgtgaaggtatagaaagatagaataggcagaagcttcgggagctctggattttctcaaagtgtaccttcgtgtgctttgaatgctcgtttcagaggcgagctcactcgagctgccaagtcagatgcacccaatcagagcaaataagtatcagtcatccatctatcgattataagtcgagcacggtcctcgagcaaggattaaccatatactcacgagcaaactgcatactcttcttcctcgccttttcgagtgaaattgaaaacggattggacgtcgtagtcgaagggtgagagagaagatgtttgggctgaaagaagaaggcaatggattagtatatttctcacaacatgctgtctgacatatcgaaaagacgtccttggacgtacttccatcgatttgcgccgctgataagaacaggataaggaaatagaacacaagttagaaatcacaaatagaacaaatattgagagatacaatgaacgaaccttagtaaactcatcttgatcttccggtaagatcttatactcttcctcctcaacccacctcttctcctctctgcaccggatcacccatccaatccccattaagcaaacaagttttttcactcttgacccagtaccctcggccagcgacaaatttcttgagccgtcaacagatgcaacagatgcaacagacgtgtctctctcagacgcgtctaggacagaagaggaagtagaattttccggaatggtcgtcggaagagggacagaccgtcggtagaacgtcagggtagatgtctttccggctttgtagataatgtgagtcacagagtctgagggcgctttcaacacctgaaccagatcgtaatatttaatgatgatggtcagaatctgagacattgaaggacttaaaacaatgagatcgtagcaaacctttgctcccagttctttcaacatttctacaaacaccccacctgcatcatctccttctgccgtcctgacatccacaaaagcgacaacgcccgccaaagccttactagtaccgtgccctctgatcgaagcgattgaactcttgcactttgacaatgtgagagatacattcgactcagtcgagttccctgatgccgtggattcagtcgaacgtgatggcagggttgtcaacgaccggttggagggctcagttgtcgagttgagtctactgtcacggagcgaggatgtgagaggaggtgggataggtggaagccttcttgatgaagaagacacaaaagagccagaacctcgtttggctccaactccgggcttgttttcagagttcggatctttttctactcgtccaccgtcagtatctccatttggatgtccagcccgctctaaagatttttttcggttggccttcattattgccaaactctgcgctaaaccagccattgccgattgtccttcacatgacaacccactcttgctaagcccagctagcccctccttcgctatcccaagtaagccgtccgcgccggaagatgggaccttgggaagaggcttggccttaggaatttcattcacgactgtgctgagaacctgctttggcttgctgggcccgagaatagacggcgcaccgttcgcagaactaggtgccgccgaatcagagcttgacatagtcgatgacgctgacgacatgtaggtcaacggcaatgaagcagctgatggagctttctctgaaaccgagtccgaggcgacactcgtctgttcgttcgtcctgtttccagaattcatctttgagggccctgacgtcttccttgttcctgatcttcctgttaggttggtcgaaaagataggtaacttgccgaccgtccccacgaccccagttccattggaagatcttgtcgagattgaagaagctcccgaagaagtaggtaatcgggggccattgacgatcgaagtcttcgcaaaggacaacttggacgctcctaaggggagtgccgaacctgattcggaggaagaagtggataacaaagaagatgtggctgatggatgcttaggagtaggcccacttgggactcgtgaatttgttatcggtcgggcatgaacaccaggtaaggttggatgagcaggaatcggtccagttctcggacgcgaagcagaaggagtagatgggaatggaagaagagatagcgtcgactgagctaatgaggcagatgaggcagatgaggcagatgaggcagatggagcgttctggacggactcggattgagaggagggagaaggatcaaatgatgcaaattgaaaagatacgaccgatgagtcgagaggtggcttagttgatatagaggctgtcgtaggttgaagagatgaggttggaagagacagtggaagcggtcgctcctccttgatctctggagtctctgccagtgccagctccgacacatccgagattagctctaacgacccttctagatctatcttctggtccttattttcctcctcctccatttccttttcctctgcgcgatgagtctcagtccctccatttacactatgtaacacgaatggtatcggtttctcagctccctcaactctctttattatcgccctccctccatctcttccaggctcaaatccaccctcatcatcgtccaaactcttggggaagacccgcttcctgggggacctcaattgcttttttctcatctttttaagatccatgagaggaggaaacccttctatccccagaccgcctcgattagcatcagcagtagcggcgataacagcacattgacgacttgggggagacgatagaggtgatcggccttcaattcttgttccagatgaagtcaaaccagtaggcgagacaggcatcggcctgtttgtccgtcctttatcttcttggaatgaaggagaaaacctgacccgtttcgatttactcgatccacttgatccaacgcttccaattaaattgaacggatcctgatcttcgggagaagaaattggcgaagacgatggagaggacgagagtaggcaactcttgagtttccgactgttcggccctgaggagagtggagaaggtcgggcagaactaagttctgcgaggtcatcccttgatctctttttgtgattcgatgctggagataatgtggacgaagatgaagtggacgaaggggtattggcaaggaatcctctgagatcgcttaaaggcgtcaaaggagaactggggcgtgattcattgggagaggtattcgtctgggaatctttcgttatgaattgactcaaaggagtagagtgaggatgcaccacagagcaggaggaagagggaataacaggggtggaagcagatatggtttttgtggcggcaggaacaaaagcagaagagcaaggagtagagggagaagatgaggaaggaggagtaggtgcaggcgtaggtatgggtgtacgaacataaaatgggttagatgcgctttcatctacgataggcatcattggaggaggagacggagtgaccctggtcaagctgcttgatccagacggagatggcacacgaggaagcacagatcgagggatgaccttagcaggggatcggctgaaagcacccgcgcgacttctttttgttccttgggcaacgagaggagtcagtctgttgatatgtccgctcaaaatggaagagcgagagggagataaaagagagggaggaagcctagtcggagaggtgggtaaaagtgtcataacggacttcttctttggagaggggtgcaaccgcatgtcgtcgtcgtcttccccatcatcgtagacactatcacggctaagtctgtttggtgatatgagaggggcaactgtcttgggaggtgacaccttagaaccaattgaaggactcgatttaggcttcagtgagccagatgaaagacggagagattgagagcgggtgatccgagcgcgcttgacaggggatgcccgtgtacgggcggatgagcggacagatggacgagaaacggtggccggagaacaactaggggcgacgatagtagagaaaacggtttggttctttttgggaaacttttttgggcgggactggagatcttcatcatcttccatctgaacaggtaccggagcatcccgacctttccctttctcttcggcggtaaactttggttcaatccggccagcctcctctgacagagaaggcgggagtggtggttgagcaaccacagatagatcaagaggatcatcggctttgatatcccggaccgtatgagtactccccagatctattgattcaaccctatcacccgcctttccctctctcacaggcacgcatcttgcccttgtcttctttggtgaattgttcgctgcttgaaccgctcgacgcgctgattgatcggacgatagatctcctcggacaatcattgacctagcagctctagttctggtgtaaacatggggagagaaagaagcagaagaggtggctcgaatagatcgtttcccctcacgacgggcagtcgtctttgaccctgggggcatttaactgttaatagagtagaataagagtaggaaccggaagagacagagacagaagttaagtaacagattacaaggaaggttgatatatcgaaatgcacgcatgacctacgcaggagaggaacaagaggaggaatatgcaatgagaaagaatggggtatatgctatccgggtcagaagagaagggtatcgccaaaagatgtagttaagttgatggaaagcacattgaacatagtccaaccaacgaccaacgaagttcactcaggcgctattaatttttcatctatcattcaaataacgcgtcttgttttccagctaaggccgcgtaactggtagacgcgccgatgcttccacaaagtaagtcgttttccatctgtacacactttgaaagggagactatcatctataatccacccacagagttcagaattcgagggagaaagaaaggactttcttggactagacagttagaccaacctcaacgagcccggcaacttccatccagccaccgacaagatgcagactacctgttaccaacacatcgacctcattctctgttgactgctctttggtctctgaacaaaccagctcaaacgcttcttggatggaggacgtgattcggatcgcgtccgggggaaacgacggttctatttctcggaacgcggaagcaagagactcttgaatttctagtgtctgatcttccacggacgattgaagatctagatgtgatatgttaaagcgttagtgcaagcatatacaaaaatgaatgaatattacaaaacaatgcacggacctcctttggattggccagatgcgtaggtcgtattggttgagaagatgaccttatcgaacagcggcacggaagaggaggtaccagacaggcgcctcgcttgagagaggagggcggtaagaagagaactagctgatcgaccatttgtacagttgaagaccaatactcgtctccgaccgccttccgttcgctctttcacttcctcccagaaccagttcccgcatccttctaagctctctgtcgtgtgggctccatccaagaacgtcctgatctgaccggcctggagaatttggcatctccctggccagcttgtattctctaatccttcttttgtcggctggtcaagaggaccttcaagcgatggagagcttacaccatacagtggggatgacggcgaaagtgagggagatttaaggagggaatcaacgagagaaagagagagcgttgcgtttgttcgttggtggatacccgctagacctgaagaagaggatagtggagacaacagggtgagatctggaacgagaaaacaaaaacaaatagcaacaagtttctttcttacctagcttgattagcgctaactctggtctgttgggtaggacaacaaaggaggatgcctatgtatacgagatcgtacgaaatcaaattcattttagtctaaactccgcactcctatgttcattcatgagagaagtggctagacaacagagtgaacagtgtatactgcaagaacgaacgtgtgcttcatcagctctagctcgaagaacttcctcgccattctctggttgctgtaccgagaacgcaggaactccttgctaccgatgttgatgacggacgaagatatgaaacaaagaaataagaaagataatttagtcacgcttacgtcctcatgtatgacaggctgttgacagaacagaccttgtagattccgcccttgttccaagctactttcccaatcgtatctcccaataaatgagtgtgatccaacccgagcgaggtcactccagcaacgactggttgaggaataatgtttgtcgaatcgaacgcaccgccgatccctacctcaaatattgaggtgtctacctagtaaagttcacccccataattttcattgaaggggaaaaattcgtcatccaatctgaaagtgctatgatgtcgagcgagtggtaaaacttcaaggcataccttttcagagaggaacgcgtggaaggctaacagagtaagatatcggaagtagaccggcttgacaggtgtcagcggattggcgatctgttgtgtgaatcagccaaaggtggagcaatataagggaagtcagacatgcttccatgttctcctcctcattgacttgacaatcagttgagcaagtaatccggcgaacctgggtgtttccttctagtcgctcccatacctcgaagaaatatttcgcgaatagctcctctgagagaggaactccattgatccggattctttctcgcacagccaccagatgtggagatgtatagagacctggatagatgaacgagggaagattcgaactagatttaagcctatggaggagaacacagcgcgcgcatagaagttcggaagggggaagaatgggagtaacgcaccgactttcagaggtctcttgatcttcttgtccaatggctcatgagccgcatacagagatcgcagtacggagtcacaaaatgctgaggttgatcccttgcctttggtaccagtgatgtgaatggcattgagcgcatttaatcttgtcggctgatctaggtcataatcccataccaatcagcaagcttacttgatgttgttctcggccgaaaccccaaagagaaacatctgattcataagtaagattgacagacctgatatcccacccttcctagatattctctcatttctaccaacgccgactcattcatttttccaccagaagccttgatggcagcgatggtggccgcgtttgactgaagagagttgagcagatggattgcatcctgcgagccgggaaacaatcaagaatacagtcaacgaataagcttcaatatcatctcaacaaagccataatttagatacgcaagacaaattctcactctatatgctctagtagaaagagacatttggaattgttggttgatagtagaagaaggcgaaaggccggggagagaagaaagtaagtgtgagataaaacattagggttacaaatcggttttctgtacaaacgtttaacttgttcatactcattgaattcttgttcaaacagagtaactctcacgcatcctcacccacatcatgtctaaccatccgttgcttcctccgatattccctgcaggcagaggtttgtgttctctctttatcattggttgtcaagctgtatccttctgtatgctaaattcggttgtctggttgatatatcggttcgttctgatctcattctcctttccagaacctgttccgccggggacgactgaggaggagcttgccaacatgcgtcaaatgacccagctcaacaaactcgttaccactgtcccagaaagctgtatattcaaaactgttctttctgctggtgcgggtttcggtctcggagctttcttctctttgatgtcgacttcgtttcagtatgaggatccgatgaatagagcaaacgtcaagatctccacaatggcacagacaaaattggcgttcaaggatatgggggtcaagatgtggggtaccggtaaaggatttgctaaagtcggagcaatctacagtggagtagaatgttgcgtcgaaggggtgcgttcttcttacatggtttctctctccggattcgaaaagcgagactaacgaaacataatattcctcttatatacctgccctcatccggatgatgctatatacagtatcgagcaaagaatgatatacaaaactcgctctacgcaggcatgattgctggtagtatccttgccttgcaaacaggtagtggtccaaaagccgtgctaggaggaggaatcgcatttgcagcgttcagtggagcaatcgacttgtatatgcgaaaggaagccccgttcgtcctatcaaccttcctttctgttctttatcgtttgtttctcccttagaaaacatccatggttgacctcgtctcctttggctgtgtgaactgacaacagggatgaagactaaatctccacaaataaataaacgttctcagaacagagttcgtcagatgtaatatataaacgaacacagcctcttctcttttcatatccctgacttgatatctcgattggctatccttggccttcttgcattgcgcaatctgtaaactatttgtcgaatttagccattccagaaagaacgtggactataaaactaggggataagaaagtaaaaagagagtcagagtttatcccctgatagaaaaggtcgtatgttgcatctcaaacgaacgaacaaatgagggaggacgctctgtcttgatatttgcacttgtaatctatgaaaagtggctttgcgaagaagcagattcttttcgcgactgttgtacgacaactagatgagagggtcatatcctaacgcagaggaccaagctgacattatcacgcgtacaagttagtatatgaggcacttcaggggtttcttaatattcgttcactatcgcgataatgacattcacttgtgcttttctcaagaaagtaaggaatgatacatatatgtacaggtcgtcagaatgagaaaaatgagaactgtgtaccccagaccgaggccaaagataggcattagaacgtataaagcaacatgcgatcaacgtgcaaccgcaaccagactctctacaacttcttttaaaggtggagggagacggtcttgatgtcctttccggcgttcttggctcgcttctggagcttggcaatggacttgttgcctcggagtcctcctccccactgtcgtcgagcctcctcgtacttgtcagtgaagttggccttggcggcggagacaagggtggcaagagcagcctggtcctcggacttgacgtcctggagaacaacacaggcggcggtcttcttgtggacgaccgtaccgagtcgggccttgttcttgacaatgacgtaaggaactcccatctttcggcaaagagcgggcaagaagacgacgagctcaatggggtcaacatcgtcggcgatgacgacgaggttggccttcttggcctcgacgagggcaacgacgtggttaagaccgtacttgacgaaaaggggcttcttctcgtccttcttctcggtcttctcaccagcggcaaccttctcggcagcggcaaggagtcgagccttcttctcctgcttggcctcaggcttgtacttgttgaggagcgagaacaactgggtggcggtgttcttgtccaaagtgtgggcgaactgggcgatcgcaggggggacctgaattgtggcggagaaaaatatgagcgcgtggataggaacttcaaaacgagaagtacagacaaaccttaagtcgctggtgaaggataaccttctgcctctgaagtcgaacgtattcgggccacttgacgaatcgggtcaagtcggtcttggggggaagatctcctccgataccgaaagttcgggtcctcttctcgaagagagggttcttggcgaccttctttccgcccttggggtctgtattgaaatatatatcgaatagtcagaggaagatcgaacacgaaaacaagattataatcgagacttacaaggagcgggagcgaccttcttagttcctttggtggctttgggctgtttggatgaaggggatcattgagacgaggggataccggttaggaatccatccaagttgctctacatggggaggaatagaaacccaagatgggacgaccatgaaccctcccctcccgacagcaccggctgagagcccacctcgcgtccgaatgcggcttcgccacatccgacgagcgaggtgttttccgagtcaaaggagaaccgtgccttgatcggtcttctagaaattgcatcactccgttgctctgtgcgaacccaactccaatctctgaccggtccagtgaatccttctacaaggaagggtcgtctctacttctcaactccaacgtctgaaggctttcgccttcgtcgaaacattgacgcaaacttgagacagaacgttggtgatgaggataaggagagaccgagaagaatttcactgaaccggccaggttgaggaatgatataagttgaatatatgcggcgagcagcagaagacacagaattcctgttggaaccgatcaagggagaacaggttctctgttttgacgacgaaaaaatacaacatatccctaaagggatgtgccaggctagccgtttcttatggaagagatagtgttcgagtcttaaacacaatagatatactgaccatggcgactgtaagttcttgctgaagaggatgggtcttgaggaagaaggtggtgctgagaggaaaagagagttttctatcaattttccactgactgattgtgtgttcgggaagtgtaactcgagccgtaaattgtaaccaagaggcatatgactttcacgtggtaacatgcaaaggtcagtcagggacttagccgaattctcgtctcctcccagccgcgcgtgaaacagctggggggaggaagtgtagtggccgagagatcagctcatttcttcaaggcaatcatccgtatgttcagttttctatcttggatgcatctagagggatcggggggatagaacatatgctcatgtttcattttcctgctgatgcgttgtgaacttgcaactgaataaaaaaatctagcccataatggctccctccacttccgtccccaccgccgaggttcgtttcgccaagttctaaattctgtcggtttggaatcacaggatattgagggagaaaaaaggggaaagaagggacgagaagtagaaaagaaagagaaaaatccggttctttgaaggtgtcgttcagaggctatagaagatgtgtttaggggtgttatgggaggaagacctttgatcgtttagccctgggaataacggcttgacgttaatcctgaagatacgcagagtcttgtcagtatgtttgtctcagtgatgttaaccatgtctcttcacctctttcttcttccatcctgatccttagcaagtcgccgtcccggagactctcctcaagaagcgaaggtccaccgagaagactcgggaggagaagctcgctaaggctgccgaggcccgaaaggtgggtctttcttgttcaaaatacaacatcaataccacacccacagacacgcacacagcatacacacacaaacacacacttcactcaacatcctcgactttgccacctcttagttcaagtcaaatccaatcgcgtcaatatagatctcgacacacttccccgctcgacacgtttagacttaaccatgttcgacatatgtccctcaccagagccgtgatcttgggagattttgatcctttttgcaatgatgcatacgtctatccatgacgctaattgacgactagtcttgcacgacgatgatgtcctcaagttaaccatctttcgggactgaatacaaaaacatcaaaagaaaccttagatcaacggctcttatcacctccgtcctctcatcccttcacacagtgctgtcggttgttcctagatgaatcccaagacatagcaaaagagcaggggctgacatcatgtggtcttttcttttctggggcgtgtttttctcgtttgggttcaactcggtgtgatatgcgtgctggtgatgtgaacttcgcgattcggaatcatctagaccaagcgagccaagcgacaggtgatcttcaagcgagccgagcagtacgttaaggagtacaccaccgccgagaaggaggagatccgactccgacgagaggcccgagcttccggtgacttctatgtctctgctcagcccaaggtctaccttgtggtccgaatccgagggttagtttgcgtgccgttcatctcttgcagctgggcatcaaagtctgaccatctcaaattctgtggacgtgtataaactttgtgtttgtttggctcggctggctttgttctggggcgttggatgatgatggaattggttgggtcgaaattcgatactgggaacatacaataaacgaatcgtcttgcatcactctgatctataatacagtatcaacgagatcgctcccaagccccgaaagatcctccagctcctccggttgctccagatcaacaacgccgtctttgtcaaggtcactaaggctaccgcccagatgctcaagctcgtcgagccctacgttacctacggagagcctaacttggctgccgttcgatcgcttatctacaagcgaggatacggtaaggttttgaagcagcgaatccccctttcggagaactccatcatcgagaaggctctcggagagaagggaatcatctgtattgaggatctcgtccacgagatcgtcaccggaggtcctaacttcaaggccgcttccaacttcctctggcccttcaagctctcttcccctactggtggatggcgagctcgaaagttcaccggctacgtcgagggtggtgatgaagggttcgtgccctttatctgattttcttatcgtcatgcatcaactaacttttgtttttgtgtttgcgcatatccctctttcacagactccgagagtccggcatcaacgctcttatcaagcagatgaactaagtgtttgagaagcttggatgaccaaccaaggtccatcgagtttccctttttgatacgtgatgtgccttttgacggtcgttcaatatacaaatagagcaaaggaaacaatcattgcaaaggacaccaaagagatatgcatgagagagatagtaaagagagatacacgaaaacgcagcgtaaccgaaaatgtgtgaaaaagcttgtgatgcgcgcgtcatcaaagatgggctatctgactggtttccggttcctggaatctcgtcttagttttccccaacgagtatgagattcgttcgtttgattccgtcttcccccatcttcccttcaacctaacatgtggttctcctggcttagccaagctgtcatagagtggattcctgttgtgctctctcttattctgatctatgctcctcagctttcgacattcgtctcctttcttgtatcttcaaagaaacgaaccagtgggttctactggatactcggtagtctggttggaccggtgtggttgattccttgggtttgctgggtctggagtggatgggcaatcttgtggcgcttggatatgattggaggaaaaggcttccctggagactggggatgggctcggtggggaagggtttggactggatggtgttttcttgaggtaagggcgacatatgtaacttctcatttctgttccttgttcatgagacttaaatatcttcttcatttgatgcgcgcaacgcgccatcctcgcatccaatgggtgtattgctaccttccagtccgtcttcattctataccatgccgttcaggccttccgaatccaggcctctcgcccaccccatgatctaccagcaaaccagatcgagcttctctttcttcgcatccttcaagcaggaatggatccactactcgagatggaggatggcccagacaccgagttgattcactcagaaaatgagctgagtgaagctttggtagacgtaggggaaaccacgaggagaggagaaagcttagagagcgtgaagagtccaagagcgcttagactagtaagaaggctagacacggccgatccaagggcgaaagccttcgcagagaggtgagttcaaaattgatctctaaaacttggacgtatatacagagacaactgactgataacctctaatcagactgcgaacatggttcttccgtatgccttgggaatccattaaaaaggacaacatcatggaatgggttgcctggtctgccttcaagtgcgtgttgcgcatttcttgcttttgtcttattcttcgaagcctctctagtcaatagcgctgactaattcttccgcacttgtatgctaaagctcctcggtggatcaagtgacaatggacccaacccagaaagcctctctagagtatgcggtcgatttgatatcgaggcgaacaggcacgatttttgaggaaggtagaacaaacaatgtcgaagtcatgcggcttaccctaggttcgtcttcattcttatttgtgcataaccgcagttgagttccttcagcttgagccttagctgatggtctgttgtaaacatatgatgaaacggcagacagagtcaacatatatcatcgacccctcgtgctgtatgcccttacagctgtcatcaacttggggtgcgaggcttggtgtagggcctatggaatgcgaaggaacaccatcaaagggattgagtgcgcacttaattcttcttctagttctgacgagaaactagatgacaaccttcaaagtcgttactgatgtgttgcttgaggcctatttcgacagctacatggttaggatccctcatgattggacaccagaacaagggagagaggataagaaccgagagccgatcgtgttccttcatggacttggtacaatccttattattcattcacatttacacgttcctgttcttacagaactgaatttttccttcgatcgattgtcacctttataacaaaaaaacaacattgcaggcttcggcttccttcagaaccaaatcgtcattgggcggctggtaaagcgatatccatctcaccccatcatgatcgtggttcagccgcatatctcgatgaatcttgttggtccttttgtttcttcaattccactatcagaaagctagctcggtgcagtatactcatcattgagcgaggcgtgataaatcgaatcctcatgcggaaatttgaaacgatgtccttcaagttcaatgtgaaccatcttcgaccgatatctaaggatcaatttgttgattcgttatcaagcgccatagagcattacagattttatgatctacaagcagaagtctcaccctcaacagggacgaagaccgatgaggtagaaacagttgacaggggtggtgtcgttatgttcagtcattcgaagtaggttcttgtctccatatctcattgtgctagcacataccttgaatcagcggcttaggctattgtcttagtaggatgctaatccatagcactatcactgatgcgccttcttcttcatccatgttaatggcaggggaacggtaggccattcttggctgatgaaggatcgaccagagctcatcaagagaagttgcttcgcagatcctgtgtgagtgtaggacgtgtcaaaagcgtattctcataaaacacctcgctattaaattaagtctgctatagacgtgagactgatgtcttacgtatttaaacttctgggactgaattaaatagagttttctgcttatgggaaggaggtatgtgtgttcgcttacattatataactatctcactactgttcctctctttcgtccaatcccaatgactaaattgagtctgtccgtctcatctatcctttcttagacgtctgcttcaacttcgtttgtgagtttatgcctttcttgatcaacatgatgatattaatataaaaatttgcttattttgcaacaccatcgcgtcgagcaactaaaacagaccgagaaccaggaaacgctatcgaggtacatgcagataagcttcatattctgtatagctcagcgctgtgcattattcacgcaatatctgtctatctcatttatgtgtcaatctctatttggttctcggtagcttctcatgagttactttatcgggtccgaactaggaattgcgaatactatatccagaaactttaactggtcgttcgtctttcttcctttacttaatcctgtttgtgtggacctgctagtgcttacatccattttcaaatcaaaactgaaatgatcagacataacacactattctttgaggatattcctcatgcacacgatccttcccggacagctttcttccttggcggtaaagattcaatcttggacgctcaggtacgttatcatcatgctgcatagctcgtcttattaggaaagatgtatggtactgaccgctcgcctcgtattgagggaaaaacagttggttaaggattacttggagcgccgtacgtggattatctggcttatccgtcgatgcacccatctactaatctctctggtgatggttgaggatgcatagatggcgctacccagtgtgtgcacttcaccccttcagatagccatggtagcgcaattatgtacgtttcctggttatttctttccttgatctgtggcctgagttcgatctgataaaatcatgtggaaatttacagatctggctctactctaaccaagattctaaagtacgtatatcgcaacccttcacgaccaagattgttaaccatgtttcgtgatcgacggctgacttggctgaactccaggtggttgtccggagatgacaaatagagatttcgaccaagctgtaccttacttttttcttccttgcgacatccatcttcgaccgaatagacgcgattgctcgtaacataagttcaaaacatgcacaccattagaatatgtctcctctcctccttctgctctcaagacttacagttctctcaatacacctatttgctgtatgatattcagcataacatacctagacataatttgcttgtttagtaagcaaccctatcgttcactctaactttatattctgctttgcactatagaatgtatgcgtttcaactataaccagtttgaagacgatccgtcttcctctttcatacagaagctgactcttaagaagctgcctattctgctcactcagctgatagagacagtgtctgaagtcatcgtttgatcgactatcaaacaagaccggcctatgccagagaaggatctttgcgttcctggagtgcctgattgtgtgcctttctgtgaaattgaacaacaacaaacatcaacgaaacaggctggtccagatcgtcatcctacgggaagcgtctccaatttatgtcttcattcatgttgtctatataaacaagccttcgttcgcttctctttccttcttcccttcatctcaggtccatcaaattcttataagcatggggttcaccataactgaagagctactggaacaagatgataccctacactcgtcgactccttctttttccaacaattccgctcaatctccggtcgacattattcggccgttacccgacctttctacattgatcgaagaagagagagaaactcgttccgaacctactcatgcgcgtcttcattgggccggtcgagtgcttggtttcgcttctcgaatcgaagagcttgttcatccctctgttgacgagaggctgccggcagacaaccgaccaggagtgtttcagctcaaaaaccctgatcttagaaagctcatccaaatcgctatcgctttcgtccagaagcttacccaggttagacctcaggaaggcgatgagttgatgacagctgaagcggtgtacctactcgccgacattctagcttccgggtcttaccctgaatattgcgagcgaaacataccgttgagcttatttatgtttgagaagagtgctttaatgggctggacgctggcctggtttcggctcgggatgcattatgaaggacagggcgatccgatgaaagcgaatgatcatttcagaagaggtgtccagggcgaggatccaagctgtctatacgtgggttccggttcacctaaccctgatgttctaaaacatgagaatcgatcgactgatctgtttttttatctgggtaacaacacttgcgccggtcatagcgaatggggatggcctatttgctcggtcaactaggtcgttcgatcgatcacagtcgagcgttcgacttgcttcgaaagtcagccgatgcagccaatgaagatttccctgctgctgcttacgtttttggtatgctgctagctggagaatttgatctgccggataccctggacacgacgattctagagcaatgtctagaccagatagccgaggtcacagacgattgtccttctccatcaatggctcggctggaccgggcgatcgattatcttgagaaagccgccactctgagctttcctgctgctcagttcaaactaggttactgctacgaacacgcccttcttggatgtgagtacaacccggtgttgtccgttcagtggtacttgctcagttcggagaatggtgagctcgaagcggatatggcgctcagcaagtggtttctcgcaggagcgccgaattgcttgcctgtcagacaagagttggcattctcttttgcggagaaggcggctaggaaaggattgccccatgcgttgttcgcagttgggtattattatgagatcggtattggaaaacctatagatcttgcgctggctcagaaatggtacaagcgagtgagtacttgatcaaaactttttgacaagaaaaaagtagtcggattcagctcaacggattgaattgtcgtttcttctttgtgtttgttcaacgaaccatcaaaggctagtcgagctcatcatcctgaagctaaatctagattgtccgcgctctcaggacctaaggctgcaccgatcttgctcaaagaacaccaacatcatctggacgacaaactagtccgaaaacgaacagacgcgattgctcgctctcaacggaccagcctcgttcgttctgaagcgagtgtgagccatcagaactccttggctcgaccatcaagaccgccgtccgttacgagcagcgctacgtcctcttcgcgcagacatatcaacgctcaaacatctttccggtggtcggctgatgaattggaccgagcggcgagcatcgtttctcaattggaaactcggccatcctttccgtctgacagaaaagacatgatcgatccggtccagtaccatccagccgagtacttttctccttcgtacgacatgcctgatttctcgcatagggatgatcaagtcgattgtcatccgaggtacacccttcaggaggtatttgtgaactcttcgacgctgaacagacaacacccacctatggaacgagccagaccaccaagaacgagggcggggatggataattcgaggcaggaaggatcaaaatatcaaagcttccacgagatgggtttcgcccctgtcaaagctgaggataaggattgtgtgatcatgtgaatgcttctttgtcggtttcttctttgtctgttctttcctcttcgcagacgtgtttgttggctatctgtcatttgtgtgttgcctctgtgaagtgtgtttgatcgttatgtctgtttagattaattttgtgtgagagagagagggaggcaaggagcccgtctggttgattgaaatctatttctatatagaatgttccgattatttcttgtttttactctatcttatttatgttcttacttttagaggtcctcaggtctcacaacgacaccaccaatcatcccccacatgagcgcctcttttccagctgcgatgttttcttcctcgtcgtcgtcatactctccatcctcgtcctcgtcctcgtcctcgtcgtcccccgctccttctacgccacctacgaccagctttccgttttccagacgacctactcggatagcgttctggagtgctcctttcgcgcctccaccggggacgagcgtgggaagagagatggaagacgtgtcggacgggccgaagacggacgatcggaatttagattgggacgttccgttggaagcgtacgtttcgggagcgagctcggatgatgataggtcggatgtaacggttgcatttatagggacgaactggttcaggagaagagaaaaaaagaagagacaggatgagaatccaagtcatgtttaatattcagacttgtccgatgaaagaaaagaaaaaaaaagagagagagaaagacaacatgaaaatggacaaacctcttcagcaggcatcaacccggcaccttggtccaatagtccatccattccgcctcgaccttggatgaggtttttcaatcggtagtaattcaccgtggcttctctcatcatcatccggtcgtccatatcgatctcgtaatcgtctccgtcgtcgtcgacgtctgagaattcgacatatccgtccgaatcgccgtcgtcgtcgtccgagtcgtcttgctctttgtcatcggcaaggtcctctacttgcgcttttgaagaaggctgtttgggaagaggagacgaattgacagccggtgccgataaaggaataggggtggggttttctgaaggatgaacgtcaggatcatcctttgctcttgatgcgggttccccaggagcgctaggcttaggaactgtgggagggtcgatcgatcgttcgacaaccgtcgatttcacagtcggtggtaatgatgatggtggtgatggcggggggagagatgtcttttcggcagaaggagaaggagtagtcgcggacgtcggtgctgatgttgatgagacagctgcctttttcttgccggagaataccgaagatttcttattcgaagaaggcatggtaggaggagccatcttccgttcgaccactatcggcttgaccggaggggcttcttggggtgacgtcgacgaggctgccaatatgggaggagccgcttggtgaggtgtagatgttggtgtaggtacgaaagcagggatagaggcaggagcaggagtaggaatagggatagaggcaccaacgacggacggcttgggtttagcaagtgcgttcgctctgaagcgactctgcttgtaggctccactgcccgcgccaggtgtcctcggaggagccatcggccgttcgacgaccatagtcttcatgatttccttcttttcctttcctcccctctctttcggctcggtttctgtttccgattccggggcgagcggttgttcgtatgtctgaccggtggagagggacgaccgtttctggtcggccgcagagaacggaatggaaggaatgacctcgccatcagtcgtggaggatgcaggggcaggctcgatggccagacgagcggtcggcttggcctccaacgtttcgtgggggacgaattccttgacttgggatgtttccgaccatgtcactgatttccttcctttgcccttgccctttgccttgtctttcgcttgcccgtcttccttctccttctccttgcctttccctttgctgaccggctttgacgtgggtttctccgggccgacgtggttgcccgaaccgaggttctctggctctttttgcttggaccggtttgcctgttctcgctcccgctcccgctcttgctcctgctccttgatctcctccaactccaacatcctaaagatggcctccttgtcgtctggtttgagtccgatccgagggggcaacggcgcgggacgttccatcacgccggccttgcctctgccttcgttggtctctactggcgaagacccgtccgggccggacgagggtgggaggtcttctttgatgtgagcctcgaacgtctttgggtcgatctcgaccgtcccgtttttcgtcatcccggtcttttttcttttctttttttcttgtcaaaagtacgggaaggagctaaggggctaggaagtgacaagccaagcaaatagtgaggtcagacctgggaacgagaaaggtcgacgatgatggatggaatgggatgggatggtgaatgaaaccaagggggggggaagttgagggaaattctaaaacgtcgctcgttagggttgccccccgtcccaaacaaccaatcgatcaaccatccatcccccggccgtggggttttccaactggaggtgctttcagcctcccttctccccaggagcgcgcaattgtctatcatcaccatcgtctttcaagtcggtcttgctttctctcgtgcatggtctttgtttcctctcgttggagctacaagatgagtaatgtacattcatatcgtgttccttcaactctaccaaacgaggcggacagaaaagaaaaagaagttttggggaaaaaaaaaaaagtaaaggagagagaaaaaaataatataaaaaggagctagc

SEQ ID NO: 3170 - DNA, 1262 bp, Xanthophyllomyces dendrorhous
actagtggcgaaagcatttagaggtcggtgactacgaagcaaaggcaagaaaagaaagaggttagcgagagagaaagagaaacgttctggagagataacgaaaaaagaaggaaaaaaaaaagaaaaaaaagaaagacgtaccacatccttgagacgcgtcggacaccgttttgacatacttgtaaagcgtgccctgcttgacctttaacggcggggcgacccagttctttcgtctcctctcgagttcctcctcggagacgtccatgttgagggtgttcttgacggcgtcgatcctgacgacgtctccatcctggatgagcgcgatcgggccaccgacctgggcttcgggggtgacgtgaccgacgacgaaaccgtgggagcctccggagaaccttccgtcggtcagacaggcaacgtcgtaacccaggccggcacccatgatgagcgacgtcggcttgagcatctctggcatgccgggtccacccttgggtccgaggtacctgagcacgaccaccgtcttctcgcccgccttgatcgagccggactcgacggcggtgacaaagtcggcctcccggtcgaacgctctggccttgccgacgaactggaggccttccttaccggtgatcttggagaccgctccgtctggtgcgagatttcctctgaggattcggatgtggccggtcggcttgatcgggttgtcgatcggtcggaggatctcttggccttcccacaggtggccgtttgtgtggttccatcggtcgaggttctcgccgagcgtctttccggtgacggtcaaggtgtttccgttgatcatcccgttcttctcgaggtagctcaagatgctggggattcctccgattttttgcacgtcctccatcacgtactttccactcggcttcaggtcggccaagaaggggattcggtcagagaccgactggacgtcgtcgatcgtcagcttgatgccgaccgagtgggcgatggcgatgaggtggaggacggcgttggtggaaccgccgagggccatggtgaggaccaaggcgttctcgagggcttctctcgtcataatgtccctcggcaggatgtcgttctccaacatgtttctcatcacgctaccgatcgagtcacactctgcgagcttttcggccgattccgcggtgaacgaggaagagccgggaagggtcattcccatggcttccgttgcggatgccatcgtgttggcggtgtacatctggggggagagaaagaagaaaaaagaagaaaaa

SEQ ID NO: 3171 - DNA, 1478 bp, Xanthophyllomyces dendrorhous
gaagaaaaaagaagaaaaagaaaaagaagaaaaagaaaaagaagaaaaagaaaaagaaagaaaggcaaagagatcagttcatgttcgcgggagggaaaagggaaagaaagccgaaaagaaggaacccaatgcgaagcgcaaagaaaatcaagagagagagactcactcctccacaggctcccggtccggggcaggcgtttcgaatgacgtcgtcctgtttttgagtgtgtcgagaaagggaacacaacagatgggacggtagagaacgaacaaccgagtcagccaaggaagcaagaaatgacgaatgaatgggggagctcgggcgagtagagaaaaggaactagaagaaaacaaggtcaagcagaagaaagaaagaggacttgcccgctcgagctcggcctgttcggtctctccgtcctggaggtactttccgtaggcctggaaggcgctgacgatgtcgagcttgccagaggacgcacactgaccggctcggatggttccaccgtagaccatgagaccgggtctgttcaatctgccgagtgccatgagggtaccgggcatgttcttgtcgcaaccgggcaggacgaccattccgtcgagccagtgtccaccagcggcggactctacctgatcggcgatcaaatctcgggattggagctgggcggagcgggaagaggaggcggaaggaggcgagaggaggcgagaggagtggtcagcgtttttgtggagggctgctgatggcaggcgagggagggagagagagagagtgtgtgtgtgtacaagaggaagggccagacaaaagagagaagatgcttaccgagtaggacattccaaaggttcccatagagataccgtcggaaacaccgacggttccgaattggtaaccgatcaggtcagactttgcgagcgagcgtttgacccgttgaccgagtccgagcaggtgcttgttgcatgggtttccttcgtacctgtggatgtgagagtacaagagtgtgagtgagtgcgatcacaccaacgcaacgcaacgtaacgcaacacaacgcaacgcaactcaacacaacacagagaaaagaaagagaaaagaaagagaaaagaaagagaaaagaatgagaaaggtgaaaaacgaccgaccacacagaggcgacaccgaccatggccttttcaaagtcagacttttgctcgaccccatcggtcgcgtacaacatggcctgcaagaggggggggatcacatatgtgagcgtgtgcagacacgaacaagaacaaaagcataaagagaaacccacttgggaagcaccctgggactttggctgggtgatcgtcctactgtacttgttgatgggacctttgagagccgggctggtgagcccgaaggaccttctgagggcggggcttgagaggatctgcctggaggacgaggcggggactagcatggctgtgacgggggatgatggatagatggatagatggatggtgaggag

SEQ ID NO: 3172 - DNA, 865 bp, Xanthophyllomyces dendrorhous; identical to SEQ ID NO: 2793

SEQ ID NO: 3173 - DNA, 1413 bp, Xanthophyllomyces dendrorhous
gccgtctccgaggccggtgccgccgccaaggtacgaactgtttcccttttgaacccttgctcccaaccttacggccccaacttatcttaatacttttgctttcccctttctcttcctcatccacagggcgtccctctttaccagcaccttgccgagctcgccggtgtcaagaccccctacgtcctccccgtcccgtgcttcaacgtcatcaacggtggttcccacgccggaaacgctcttgccttccaggagttcatgatcctccccaccggtgcctcgtgagtctgccttaagggttttttttcctcttcccattcatcaaactattctgacccttgtctttttcattctgcctgccttctctttgtaatccccccccctcctccttgccccccgacagcaccttcaccgaggccatgaagatgggttccgagacctaccaccacctcaagaaggtcatccagaccaagtacggaatcgacgccaccaacgtcggtgacgagggaggattcgcccccaacgtctctggagccaccgagtccctcgagctcctcgtcgaggccatcgagaaggccggctacaccggaaagatctccatcgccctcgacgtcgcctcctccgagttctacaaggacggaaagtacgatctcgacttcaagaaccccaactcggatccctccaagtggatctctggtgaggagctcgccgcccagtacaacgacatggtcgccaagtaccccatcgtctcgatcgaggaccccttcgaccaggacgactgggcctcgtggacccacctcaccaaggacacccagtcccaggtggtcggtgacgacttgaccgtcaccaacgtcgcccgaatcaagaccgccatcgagaagaaggcctgcaacggtctcctcctcaagatcaaccagatcggtaccatcaccgagtccatccagtccgtccagctctgccagtccaactcgtggggtatcatggcctcccaccgatcgggagagaccgagaacacctacatcgccgatctcgccgtcggtctccgaaccctccagatcaagaccggagctccctgccgatcggagcgattggccaagtacaaccgattgctcaagatcgaggaggagatcaaccttgccggtggacaggctctctaccccggactcaaggccttctccaagggtcttgccgcccccgagttcgctctctagatgtcgttctttcttttctgtttttaaatattcccttttccatttcttttgggttttgccaatatcatgtttaatttcccatgcacattgttttctcctcgccagaggatccacataacatgcctttgatctttgtgtgtgtaagtgtgtgtgtgtgagatacaagttctatggaaaaagccactgaacagagtgtgttaagaat

SEQ ID NO: 3174 - DNA, 14090 bp, Xanthophyllomyces dendrorhous
catacacacactcacacacagataaacacgggcggacgatgttatatgaatgaacttgaaactattctgtagagatatcgtctcttgcctcttgcctcttgcgtcttacctcttttccttcctttctccctcccctcttctcttgctttcaagactgaccggtttggcacgaggatgagaatgcaggaagaacatgaggatgctccctcgaagggttttctcacgatgagacactgtctggcatcgatcaaaagcataaagagtaaacagcaaggagatagagaaagaaaagaaaagaaaagaaagaaagaaggaacagatgaagatgtgcggctggaagaccggtcgagtgtgttggttggtataaatacttgaattgaacgatgggagaggatctaaagagataaaaggagaaagaaaaagaaagacggaagagagatgaatgatacagattcttctatatattgatgtccaaaaaaggaacaaaataagagagagaaaaaaaaagaagggaaggaagtgaaagcaaggccagacaaaggaggagtttagatccctcctttcataggttcggccacgagaagtgctgttggcgacaagaaagacaagttcgaaccgtttgtcagtacagacaaataatctttaacgcaaaaacaaaaaaagagaccaccggcacgcttaacataccttctgccgtctccttatcctgaccggtcagaccttcatcgtccgcgccgttcgcttccaaaaacgcatcgagatcagccatcactccgtcgtcatcctcctcctccctgcccgtcccgtcgacctcatcgtcgtcgtcgtcgtcgtccccaatgtcatctatcgcgaaccgttgtcgttccatcagcgcgtcgttcgctctttcaaccatctctctttcttcccggactttgttggcgagagtgttaccggatgaagcagacgcaactgaaaccacagaactgatcgattgtcgtcgatccgttttttgcgatggactcagaagagattctctcctcttgggctcgacgaatgtcatatcggtctttccaatcgccggccgatgtacaacctgtcaaagttaccccccccccccacacacacatgcgattttaagttttcagttatccaaacaagtctcagaaaaggaagaaaagctaccgacctggtgctttccgaatcgctgtcctaccccatcagcaaactttcataatgatcaagcctcaaattagtatgacggtgttcctcggagcaaacatcaagacaagaaacccaagaaaactcaccttgttgaacgccgacttgttttcgtccgttagaaccatgcccatgattcctccccatagcccagacttggcttgctcagcggccttgttactgtaatcctgcacaggctccaactggaaggagcctgacaattctgattcaaagaatgcctccaatacctatagccgattccaaacatcgccagatcagatcatttgacataaacatgcaccacaaagaaaaaaaactcatgcactcacctcatcggccaacacaaccatacgaaaagtggctagagactacaagaaaaaaaaccaagacagaaaagaccaacaaacgtttgcgcactgcccatttcgtccaaaataataataatatagacttaccagataaggcaagctgtgatgaccaggagtagagactgagctactcctcgatctacccaacacctggtcagactctgaagattcactatcgatcaactgctcgacagcagtcgaccgtctagtctcggggtgatccggagaggtagcgtccccgaattcatacgcgttcaagataaatttagagactgcagcgaggaagacatcgcctggttcgtttcggaacacgaaaagcaaggattccgacagctgaagcacttcatccttggtcaggaacccatcatggttgttgtcctggcacacaagaaacatgtcaaacgaactgtgagtggggtatggacgaaaagaattgggtgaccgattcatcaagtaaacgctcacgtgtaagttgaagaaccactctatagactccatcagccctgcgcccatgatcttgctgaggcccgagacaatgtcctgacaagaagcaatagcgataatttcatgttgttaatccaaatgcggtacgaacgaacgatgcactgcttttctttcaatactgaatgactggaaagacaaacctgtaacgaaagggtgcctttgctagatctatcccaggagtagtatattcgatcgataagatcgtggtccgctatctgtcgatccaatcgctcaaagccgagtgtaatagtcacagtgtcctctcttgcccaagttaagacctcggaaaggaacactctgcacatgaaaagcacatccacaagtcaaagttgataaacatatagtgtgccccgatagaaagaaacgaagtggaagaatcaaatacttacttgaagatattgagatcgatccgggtctctgtccggccatcatcggcgatagcgctcgttgtcgtcggtaaactatctccttctttccttttcggatccgaacagacagcagtgaagaatttatcatagatgatactgatttgttcttttgtgaaagacccaagggatttgagatttcggacggctgcccgtttcgagaaggactcgatttcatccgcaatgtccgcacggaaccgtttacgttcagataggatggtttcctcggtgataatattgaattcacggaaggcgacaactagtataaaagaggggaggtaagacgttaacagggatgataatattgaggatgattgtcggcgacatacctagaagctcttggaaattggtgattgatctgacccggggctatcaacagaccgcaagtcgaaacatcgtcaggatccatcgtattcaacaacgcttctgatgacccataccaaactgaggggctaagcttacatcatctgactcaggatgggccgagtctccaattgtagcgaagtaatctctcatcaagctagagggcgcatcgatccataagttagttcgaaaagacagacaagatcaatgtcaatgaaagcgagatgacaagataaacgaacctgataaacattccatcgtccgtcacgtccatcaaggcctcaccgttgatcttcaatatagcttgaaatttctcggacgagacaacgatcgggtcagatgtctgcagctattccattctgattctagataacatgcgtcactcgtcgaagaagaaggaaactagacctacagagaccaatctggaagagaaccttaggacccattgccatgaagcagtcacatattcgatatgcaaaaatcaaaggcatcgaattgatatataacgacaagaaccagctgtttttcgccaatcgttcaaataaacccctccacgatttatcagttcatgtgcagatatgcaaatgtagacggagtaaaaaaggacaaacggtagggaagcaaccgaaagttggacgtccacacttttaaggtgatcttgaatcatcggaaggcatttaccaaccaagctctcgaacaccctttggtccaaaagtgtaccatgcattgacggactataaggatgttttgttgaagaaagatggatgaaagaatacatgttagaactacttcatatatgtgggtaatggagattatgtcgatagactgccaactgacgaatagtatccaggctaaatatccgaggagaaaccgagaaggagagtcaaggtcagaatttggaagagataactgatcaacacaaaaaatgacgagtttgaatgtaccagaagtctatcacacaagacctctaacaagaagaacgcttgctcctgtatcaccgaatattaatgaatggaatacagcgcataagtatgatcggcctttgcagaggatgaaagcgctttcggcttggacagacctccgacatgtaactgagggtacaagagaggaataattggtctcgaggtcagcgcgccaacaaacaaatgagagtagagaagatcgaaggcccacatcaagattgcggcagtgaggatattcatagcttggcagtacctaagacaaagaggaagcaccagtatgaaggtatatatattagcagacgacagggcggtaacataagaagataacggacaaaacgaaacaaaccctagttctggatttctgaacgagtacgccgtcaataccctccgaagggattctataccctgctctgtctggaatcctttgtactctggcaaggatcggtagagatccttctcgatctcttccgtagcggaggtgactattcctctgttatcctccaggatcttctcgtataaccctcgattagcaaatcgcaggtctatgtttcgacgcgcaagtttgtaaacaatttgcatgaatccgtaagttggttgtatgaaacaaatactggaagaggtttgatgtacaccaagacaaaagaataaaaacaacagaagggacgtacgtatcgagccagagaggacctcccagagttctcctcgaagtcgggatggaagaccaacttgcaacaaccgctggaaggatggataccgaagcactaaaaatgacatcaaaggtcagtcaacaaccaaagcacttatgaattttgcaaggatacgaaggaaggagaaattacaagtcaatgatcttccatgaactatgtgcgtagacaaagagaacaacaccagctatcagctcgtcaccttgaatacatgtagaaatttagagcgatggcgatgccaacagccctagaacttggaaggaagcatgacaaacaggatacttaccggcaaaatactctttccacagcttgattttgcttctctctctgagcttccgcggatctccagggaatccgaatgtctcgcctaaccctctctggtagactcctttgctttcgcctccgggtcctcttgcatcaccttcggccacggtggatatcagactgccttgaggctcgtcatcgacagaagccatgagatactcggagtagagtgtagcagtgaacggtttgagaagcttcatttgtggtaactaaatagatacaaattgagaaagagggacgaaagagatgagctattggtcgtacgtaacacggaccgagggcataaatgccatgagctgatagacggggcttacttgcgctttgagagcgtctcgaagaagtatacaaaaatgttctctgagtgagcgtcgtccagttgaccgggtatataagttcgagatcagtcatagagttatgcgcatagtgtaatacgaaacgaatccttgaaacaaagatactcacgccgttggcagcatactggtcaattgcaaaatctacatccagaccaacactcagttgttgtgattaattgttgttcgatggagtattgaagttagaaagcaaaaaaagcgatagacataccactcttaacccgtgccaaagagaagtactcaatgcaaacactccagctctgctgttgagcctttcaaccctgcggatacagctcagcgggatgacccatttgatcgaccgtttatccagcgaaaggaaacacaggtacggagggaggagatagagtcgaccagcctgcaacagtaagatcagatgtagtaaaagaggggtttgacgagcatatacaggccaaaggagagtagaagtgaatcaggatttgttaggtatgagcgttcaaaatcatcaggaaccatctcccttcgtgggatataagtctcgtctttgaccgtgtttgaagagattgtgttatagatctaacatctcttcgaatcggatcaaaagcgtaggcaaaaagaagagagatagaagcgagaaagaaagcacaagggaatacgcacatgaacggcctcgtcagaaatgctgaccacgcaattgatctccattgattttaagctggcatcttgttccgagacagaagggaggttgaaagaatgacgagtgtattcctcctttgttggttccttctgagctcgaaggttagggagagccatattctgaccggaagaacaagtagggagatgagtagatgagagatgagagatcaagcacggatgcggcgtaggtcgcaatttcgaagaatgtagctggacgtccttggccgtgctctcccaagtctcattcccgctcttctacctcgtattctatatgtctatgttcacatcacttacagtgtgtagtctctagtaaatgttctcttcgaaggaataacatccagtataacttatgataggatagaccacatagaagaagatgtttcatgtgagtgatatgcgtcgcgctcttaggactgaataggcatacgtcctgattacttttatttagttatgagtaagtatgtctcatttgtatttcaattctctcacgaagaaagatgtaatcaataccagagactcattgcaaccattcagcatagaatccatacatcacacagagaatagagatagtcagaagggcactgttcgattgcaaagtgagaagattgtacgatgaaagagatgcctgatgaagaacttgtttacttgtttcattccccttcagtttcagcccgtgggtgtgtcatcacaagaaggatctcacgaaacgcaaggccctcgagtcttcttcctgtgatacatctgctcacgttcgctcaaatatcatcgtgatgttccggaacttcatttccctcagtcaaggctgtcacgcgtataaaggtagaaaacatagggagggtacgacccgaaaacagagacgggtcgaagattgagagcgtaggccttgtacagtgtaggcggaatatttcgaaatcgaataatcggctacgccaagcgcgccgtttcttcaccccaaagctcttgatcatattatcgttgccgctgccttcgtttctctaattctcgttcgcattcgacggaacaacggatgggaagaacatcaaggcgaggctcatgtctccaaccatttctattttttgtcgtttcttttcctactcttctcctgtttttctcatcttcttctcatcttctttcgaccttgactactacatttcttctttctgggtcatcccttccttcaacatttccctctgcaacagcatattctgcccaactgaaaatttcgaagcattagaactagataacgaaaaagggttatggaacaagagaaagaagaatggtctctgccgtgtatattccctgtccacttccaaacggcttgctagagtggccaccgatgaccgagtacgactgcatgtcaagaaccgcgttcatcgtctgctacatcttgactatttgtacgcttctgcctcttgtcgttttctttaagctcgcacgggttaaacgctctcaagtgatcctcaacattcgttttccttctcaatctacctttaatgacgctttcggtcaccgaaccaggagatctaacgagacctcgtattgtgcttcctatcgttcattcacctacaccaacactgtccggtcggactgtcctcatctatgggaacagctttttctagcgctatgcttcaacgcgtcaacggccctcttactgtgcgtcttccggtgcggcttccaatcttgagcgctaaagtcgaaagctgacaacctgcctaaatttgtgttccattcggtttctctactcgtcagaatatctgctcccaaacatccaaataaagcactgtgtctgctttcttcagctggaacgatgtccggcacagcttttgtggcagttgccgccatggacactgtgctcatggtctggggaatgcttcgtagagcaagtggaaagaagatttggctaaatgaatactttgagaacatcgtcagttgattgatttctcgtccgtatctcatttatttggttcatcattctgttttgatccctaagatttactatcgaataatgtagttgctctggctaccatgggccatctatgtgatcttcttaccattgaatcttgtggtgagttaagtctggtttcgtttactggtcggcgttctgctcctaggtactgacatccggtccattttccacataacaaatgaataatcttgattgtaccggaatttatcgctttcgcctatctaatactaaccctgtatatcttctctacgccatctagtatacggccttgaattcagagacactctacgtgagcacaatgacatgctacgctgacaatgtcatgtaagaccttacttttttgttttgtttttatattaaataacaataacaatataacctaattgtatctacttgagttcattgtgatccgcaagctcattttcgttctgtttggactagttagttagtacgacgttaactcatgtcgtcgttggaatatccttagtcgctgctctcatctttgacagtaagttctacactttccgctgttgttccgaagacgaaacacaccaaccaatatttgcttctttcccgatcataagtctggagtgtgatcatgctgcttcttcaccggcacagagtgggaaagacaacggcggcggagcgagatatggagtggtctcgtcgatcatacgaatcgaccatgactgtcaatctgcccatcatcagtcgcgtgctcttatacagtctcagtacccttggtggactgttgtaagcttttcttctgatgttaactcttatttctcgtcttttcatcgttcgttgcgaccgagatcaacctaattccccctggagtttcttatcttctccccttctttctcttcaattgaaatcagagcggccatcatattgtatgtcaagccagagtcacacgctccagcggtctatcaatcgacttgtggcgtgtcatgtttctctatttttggtttccaaccggacatatggaaaaaaacctaccagtccctccgtttcctatcaacatctgtactcaagtcacagacatcgacgtcaagtccgacaccaacaagaaaccagaaagagaacgcacaagcggatattgaatcaggacaggattcgtcttacggtccgaatatcgatgatctttcagacctgagtatacaatctcggacatgttttagatcgatacctctacaaacgatgccatctggatcaagacggagatcagaatcaggttcgagcttcaatcaccacatcagcgctagcgacgacgatgaatacgagaagatggaagcccatataacactggaagagtcttttcgatctggcaagacgatgaatcgatcggccgaccaagttgaggagggtgttgttacgtgtctggcgtataatagatctactcaagaaccagttgaagtagaagcaaaagtaggttcatctggtcccatggaatcagtgggtaggtcggtcgagtcggaagcagaggtaaagctttcggcgaggaagtagatgccactgggcggatgtagtaattgtttctttcgctttattgtcttgtctggttctgcactgtccgttggtttgtatctttcttttgtgtgaatatcatcaaatcgctcttcgtcggtagtcagtatcatcgtcttctcctctcgtcatatcctatctgattttattatgttattttctgcttttacacgttcccacattctatgacacatgacgcttttctcatccttctgcctgcccgtcaaattatacctctgtctatctgtttaaatatatatacgcatcatatttcaatctcttttgcacctaatcatttgctcgtatcgtatcaagtcatcatcgaccggcacgtgatctatgtatcactattaattctcacttcctgcactccgctctggtttcccagaaagaagaaaatctcgccaggagatgactagtacgtccgttcgtctattcaagacctactttcttcatctggctggctgagcgacgaggaacatggttgctgatcgacacacacacgaacgcacgaagaggttggttagcaatgtgattcacatcatatcaagggagagatgaagactgccagaagcaagaaagaaaaagaccaaaatgaaaagtgcaaaagcaagtaaatacgttatagatttaaatagagaaaaaaaagaccatgggttcatgaaaactttataaatttaatgaggggagagatgaatctccgggtgtacattcgaagtacaattgagtgtataaagacaggatacgatgtgttcgtttgaaaaagattgaaggaaggtattttgagagaaaaagacgttgaagtgtgtaatctatgaacccaagaaaagaagaatacatcttctgttttgatcgatgaagacctggttaaaatgaggaaaacgtagaaactataggaagcgtacgagcgggaacatgaatgacaacgaaataataaaagctaaaaagagagtgtaacgaaggagttaaagaaagaagaagacaatggggcaaacccataagtaggccaacaaagccttgtctacattaaagcttcttcatatccggctcctgggcatcaccgtaggctggtggggcaaaaggcgcttttccagcgtcttggacaacgggcacctgtccgtctaccgggtcgtctgaccttggtccagctttgtttcaagaacgcagataacccaatcattagcagtcggctagaaaatgattgtaaacaaagaatcgaaaaaaaaaacatttgaaagggcgtactgtatcgtttgtgagcgctgacagcgtaccaaataaaagaaagcaacatgacacccaatgtgataacccaagagctgtcgtagaggggtaaggagaagaggaaaaggcaaaggcgaaagatcagatcggcagtttagttttctgtgaggaaacaaaagacgaagaagaaaagacgtactagttgaagttctgggcggtgatgggttggaaagtaggctacattcgttaccccaacgagaaatatcagcgccagtccggagaaccctacacaaaaagataggaccgttgtatccaaaagggtatatagaaaacgtacgaaagacaggatgatacactcgaagaatgtccagccgaccatgagtagattgatgatcaaaccaagggtctcacccatctgttttcgaccatcagcatcacaaagttatatgtcagactcagcgatcggtaccctgattgaaggaaacaaaaatagatgggaagcagaaacacttagacttacgtagaaaggacctggcacaaattgaacctcgggatggtttttgtagattcttcgggcaatgaccgggataacatatgagatgtccaacgcaactgcgcacctgtttgtattcaaggaatccatataacgagataatcacagcaatgtcagggtttggttttctattttctacatgcaaaagggcatttgaaaatcgacgatgaaaaggggcagccaagtattgtgacaaggacgaacatggaaaagatagcattaacctagagcataagtttgaccattaattttttttaaaaaagtgtcaaacaacgatccgcctataagtagaatcaatcttctagaaaactcacggcaataccactagcgaagttcaaagctcccagtgccatactgaaaagaacgacggcccagacggcaaacaatggggtttgagtggtcttgttcaaccttccaaagaatccccaatcaggaagtgcgtgatcacgactatcaaatccaggcgtcgaaccagtcgaacacgtgttagtttatatatatcgacaaagaggaggaatagatgtagattagacttacgagaaagcgtatagagttcgggagtttgcctgtaaagcagtctgaacagtaaagaatgctaccaaacagatgaatgaccagaggacgagtgttcctgattttccaatccgaacccgcatgatctagaagcatatatcccattttttttcttctgttagctccatatcctcagaacagtaaaatgattgataaagaaatataaatacctcaatgaaagcttggccagagaacccaggaagatcgcgtatgtcaggactgcaaaggatgagaacaatctgtgcgctcagaaacagataaatcaatctcagtacaattttgtataacacaaagccacaggtacagtaggcactatgatgaacacgcacgtttagcaaccatccgatgactccagtcccggcaacagcaacgaagatggcaacaggggccgcgatcgccgctctcttgacctcaaaagagatatgagcgaccgcgtcgtaatccgtcatcgtccactggacactgagtaagccaaagaggaaggcgattccatcggatttgtagccggtgactgatgacgagaatatcaagatgactctaagagtgggacgcgaggaaactctacactgagtgggctgtaaaaatagaaaactggactagatcgtaccattgttgatgtctccaaagacataagacgcggcttgcatttcgctcctgggagtcgtagccaagaggcagatgatgaccaagaaggcaatccctgtttttgaagcattaatttggatacttcagtctgcaatctttgaagcatgcatgaaaacatgatagttgcaaccaaggaacaaatggaaaagaacaacataccaatgttgatgaaaacaaaacctttggtaaagatagcgagctctctagtcctcaaagagttgagcagtccgtgaaggacgagtaacccggcgaacaaaccccactgcatgatcgctgtaacgacgagatctccgtctttgccaacagagacagcagcccagatcatagtagccagaccgaactcggtcgacgcaactccagcaacttggccgagaaggttgagcctagaggacaagaaagtagccatccacgtgcagatacagtcagtaatggacgcatacttgtagagagttgcgcgtgaaaagaacgtaccatctttaaagacgattaagaaaagaagtgcgatcaagagttagattgggcgatgtatgtgcacatgcatcttgtaatcacgaaatagaacgagaacatacccaacgacccatccggtgatagctcggtatttctaaataagcaaggaaagaaggccagaaggaaaagacacgatcagctaatggctttggataaagggtatatttacatatgaacttacctgaggaacaagccacgcgctggctgagtatacacctccacaggtctagttgaaacaaaagaacggcgaatatgccggcaagcatcaaatcaatataccgttcaattcgatttatatgacgaacgagaaactcgacgaccaatcgatgatcccagatagtgtacgcacaggataagcggaaacaatctcagcaatggaagctccctgattttgtaccaatgacagaatgatgacaatgaggttaactacgaattctaatatttgaagagagaagagtgaaacacgtaccaacgtcatgttcataacggaacccattgcccaacaccaaaccacacttgctggtccaccagattgctattgatgccgagaaagagagatagacatctcaaacggttcttagccagaagttcccgttccgtttcgaacatagcgtaggtgtggatgtgataacagttttgctagaaaacacaaaagattgcacataccaacggaatgttgaaagtggtcgcgattgacgaagacattccctgcgaagcgtcgaatatagaaataggaggggtattgaggtgtgatcggagatacgcgctgtaatgattagtatatgcgatgagaacgaagcaagtcaatgggtcgtaagagaggacaaaccatgatggaaaaggcaaaagagaaggttgacaagctagaaaacgattgttgaactcgaaaattagtatttgacacacaagacagaagtgaggaagagcagacgggcactcaccttccgaactccctgtggaaaaaggatcggacatgataagagaacgagatggctagtcagcacgagtgtacggccaagaggacttgtcgtcgctatttttcctcaagtgtcctcaaagaaagaggatttcttcgtcggacagcccaaaagaagggtgggctgtcttttctcgttacgtatccgaagataagtggtcccgcgctggggtgaatacaattgtatgaacgcaaatcgcgcacgaatccagcgcct

SEQ ID NO: 3175 - DNA, 9286 bp, Xanthophyllomyces dendrorhous
ccgaaaagaaagagaagaacaaaagaaaaaaaaagacaacacaactgtctgccaagaacgaacctaacaaactcattcttcagtccgaaccgtttctctaccaacgcatcatccgtatctgtgcttccgacagattgaaggtgagcctctggatcagcagcgtccatcatcccgagggacacctgaaaggatgattcggacatcttggaaggtttacttgagaaggcgaaagggagagggagataggataggaggtagaaacagaaagagaagggtgcggagcgaggggaaaaagtttcctcatctgttaagatagcttgatcggcgctcatcggagggacggtggtcagtaacattttggatcagcgtaaccaggttacacgcccaaaatgttacttataaggaaagcattctccttagttgcagcagaattcctattcagaaatcctatcatcacggaaaactgaaacatcatcccatgggtatctagcagatgaatcgataagacacacataatgacagatataggggtagtgatggatgctatagggaaaacatttgacacgaaagttgacactcgattgagcgggagtacgcgagagaaccttaggggcattacgaaagccagacgaagatgtgcgccccggtgttatctggaccatctcttttccttcgcataccacctactctctttcgcccttgtccttctttcatcacctcccgaacgttgtgccctctcaaccatcaaacccacatctatcttttgtgatactaaatagggattacgactctgttcacgactgtaccttaaaacacacatatctcttcggatgacggtctctcaatcatacggagatccggatctcgaggacgatgaggaaaactcgctcgacgaaggtcttgcgatgatggttcttcctcactttactgccaagaggcatcttacaggtggcaatcctagagcttgctccgagagtgtgtatcccataagattcctttctcgccgatctcctttgtacataaacacacattttctcgtagttgaccgatttttcccattcccttccatctcgaatttgtttgattcgctctcattcagccgatcagcctctagactggcgtcttcggtcaagattacgaacgagtcaagcagcattactcatctgtctcaatatcggcactcctccgcctgacttcctcaagattgcggattgcgcaaaactagaatgttgggtagatccctctggtatgaggccagagaaagctcgtcagtcttctccttccgtcttctaccttgtccttacggttataatcagtatagcttatagttaagcatttacattcacgtaatgacctcatctctatattactgctggtcttagtcgaggaaattggaaagaacttgcagcgacaatttgaaactcttgctcagaaagttcggttcaaactggtgagagcctcatctcctttgtccatccatcgacttcaattgcacatagaattcacatcacagctgtcttccagtttctggatccagctttcgaagacaccaagaagctctgtcacagtcttcgtaagtctgccaaggatgaacgtctgttgttctactacaacggacacggtgttcctgcaccaacggctagcggtgaaatctgggtgttcaatcggacgtacacacagtacatacccgtcagtctattcgaccttcacgagtggttaggaaggtttgtcttgtacttcatcgtctcctaccatcttttcttattgttctcccgattactaatagtctgcccggtctcctgcttcagtccttgtatctttgtatgggactgctctcgtgcaggtaatattctcgacaacgtcagtcgactggccgagagacgcaatgccgagaatagaaaacgagcttcttcagataagccctcgtcatcatcaggagagcaaccaggctcgtcatcatcctccttccgaaaggacgaagatacaaatcccgtcgatggtggagcgacctcttctccttctctccgagattgtatccagctagccgcttgcggcgcgaacgagactcttcccatggaccctcagcttcctgctgatcttttcacgtcctgtctgacctccccgattgagatcgctctaagatactttgcacttcaagatccactaaagcctcaaactccaacggatgcgccaagagcgcgagtgacgcttgagcagattgggcaaatccctggagatcttaaagacagacgaacaccattgggtgagttgaattggatattcacctcaatcaccgatactatcgcttggttggtcttgcccaaggatctgttcagaaaacttttcaggcaggacctcttagttgccgcgctctttagaaacttcttgcttgccacgcgaatcatgagaacatacaattgtactccacgatcggaaccagaattaccgccgacgcaacaccacccgttgtgggactcgtgggatcgaacgattgatgcttgtcttgcccagctaccgaatctattgaaggcggaagcttctgcccgagatccgacgctgcctcctttccagtacaaataccaaccttcgaacttttatgttgaacatcttactgctctcaatgtttggctattcaacgcgggtgtcgttccgagaccgctctcgtttggtgattctaatacaccggcagtatcactcgttcatcaggaaagacggccaccggagcaactccctatcgtcctacaggtccttctctcacagactcacagactgagagctctcatcctactttctaagtttgtcgacttgggcccctgggcagtccgtcaggctcttgatatcgggatttttccatacgtacaacgacttttactgtctcccgcaattgaacttcggccagtgttgattttcatctggtctagaatcatggcggtcgacaagtcttgccaggctgatctcttgaaggacaatggatttgcttacttctcgagcatcttatccccctatcagaacacaaacactcccttgttgatgtcgattccaaactcttccgaacatcgagctatgtgtgcgttcgtgctctccatattctgcagggactttcgacctggtcaacaagcctgtttggcctcggacgtttttgcctcgtgtttgtaccgaatgaaagatgatgactatctgctgcgtcagtggggacctctgtgtatcgcccatctgtgggccaataacgatgaggccaaagcgcttggacttcagctcggtgcaccaaacttgttgtgcgagatgctgagagacaactcggttgaggtccgagcggcggttctgtacgcactcggtactttctttggagcttcaagttcgagcgatccaaacgttcgtggaggtggtggatccggtgttcagcttgatcgatcagaaagggatcaactacggacagagattggaatggccacatccgcagtattggctctcgatggagatgccagcccgttggtaagaaaagaactcgtcgttatgctttcagctatcgttagggagtggagaggctggttcgtcatctccgcatgggcgtatgcagaggacgagaagattcggctaaaaggcaaaacgagaagcgcacaagatccgcttgctagagttctcagggaatgggcagggatgccaaggtcggagggaagtagccgagcggaaattcaagaggatcagatgattctctcgagctgcagcaccgtctacactgctcttctggagatgtcggtagatccttacacagaggtcgcgtctttggcatgtacagtcgtggattacttgaccgcgcttcttcttgactctgctttcatggttgccgatggatcgtccatcgagccgtcgtattttgagaagaccccacctcttcgaccagactatgttcatacctcaggcccggctacatcaacaactggctcttctttccttttcaatccgaccactccgacggcgatcccaaactttgtgaatcagacggtgtaccctttcccttcgaccgaccttccggttgaacttcagccggctccgacacctgaacatcatggtcatcatccgtcgaggaaccaaagatcattacttcgaaaaaacgcgtcgttcgcttctaggctaatcggtcttgccggtctaacccacccatccacgcccgaagaagaagaagatgaggtcccaacaacgatggcagagatacatccacctgcagctggattggataccgctcattataaatcaccctaccttactgcttcgacttcttcatcgtccccttcaagctcccgacctaaaacagatcaatcttatgtgaatgcatcatcagcttcgatgacatcccctgcatcctcgactacgctgaatgcccatagaccaacgacgccatctacattgtcagcttcaatgcattcatcgattggaaacttgcaattttcaactcttaataacaatactggaaacaactcgaccacagcagctagtgacagattgtctgaaagtccagccacggtctatccaccttgcacggcggctcaagtgatctttgcacttgtcgaagaggatatggaacggttaatcatcagaagacagcttagatcggaagcaggcttgagagctcaacaagctcagcaagctggagggccagagtttgatccgtacaagttggctggaaaagtaagcgatttgggattggggctggtagctaaagaagtgaaggatgacatattgccgttgaagagtggcttcttcgattggagttgtgagttcttttgctctttctcttccgtttgcctggatgtatgatagaagttgacaatgactaaaactttgttgttgctaaatgtcttgatcttcacaggcgagtactacaccgagcctcagatgagggtatgccgtttctctcctcttttctgttcctagagagataagtaacgcacactaagcctaacctctttatgttcaaatttgatcttcctaagccatccgaaagcgaggaaccaggaagcgtccagtacaatcaacaactatggagacgggaacgacacgagcggatcgatgcagatgccaggacaacagccgaaaagatctcacaaagcgtacggatggatctggagaagaatcagagacccagtatgttttgatgtctgaacattcctccaaagcatttgtgaggtaatcagactcattcttgtgtcgttttcgtgggccggatgaacttttaggtaaacacccatggaaacagattgccaagattcagaatgatcattgggcgatgaaactctctttcaatccgtacgaggagcatctcgccgtttcagatgagaatcatgtcatatcgttagtactcttcagaaccccttcacttcttgctctgtagctcgatccggaagcttatgatttttcgtgtatgctctgattttgcattacgtagtgtatgggactacaagcaacagattgtattgaacaagttttcgaacggaaccacctcgagccctatcacaagtctacgattcatcaatgaggtttctgctgctctatgtttgactgccacaggtatgtagtcttgttgtgacatgtataaacgattgtctttacactattgatgtcatatgcgttcataaatctgttcatttctgcacgggcatagccaccggttcgatccgacttttcagaaactatgaccgacctggagaagttgagttggcaactgcattccgagcggtcaccgtgacgagacctagcgagaatccaactggtacggtcaccgcttgggaccagctcactgggcagctatatgttgggggagatacgaacactgtcaagatctgggacgcacatcgagaacttgccgctgctgtatgtagtcttctctctatatagacaacacttggctctcatttaacgctaatgcgtttccctctcgcgttctttggaaacaggaaatcctcacgggagttaatagtcccttgacgtctctttcaactgagactgatcccgggttgatttttgtagctgggttcggagatggtcaagtcagattgtacgatcctaggtgcaactcagaagattgtgttgtccgatcgttcaataatctgactagtcgaatccgagaggtcaagcttcagcaaggcggtcaatatatggttgctggaaggtttgcctacctctttctttctaagagctgcatcccaagtatttaaccttagattttgtctatcaatcatggtatccagttcggacgggcaagcagctatatgggatttcagaaatgctggactaccagtccaccagttacacgttcagccgcaaggactgtcaaacatatcgacccattcgagcgctcctttctctgcttcgtgagttcattcttttatgtctcagatatcttctgttcctgatgtaaatactcattctcttcttactatacatgtggatacaaaaagcctttcggttcccttgtacgatgctgccacgcaccgaaaaacgcaacatctcgacattcactatttgaacccctctacgacccagggcttgacacctatcgttcaaacgttcttacctgcttcatatctctccccgacttacgaaagacgtcggtatgcctcttgggataacgccatggtattccaccccaaagaattacttttagctgttggaggagtggattcttcaatcaggatcctggctccagagtttgataaatgggcggctcattaaatagtgatcaagaaatcagtggtttttcgcctttttgtaccctgtctatggaggtctatgctccttttctttggtagttttaatcaagatgtacatgtaatggaactctttgtatcacgtgtagccattgtctttcttctcagtctcgtgcccaacaaactattctcaaagaaggatcaatccgtaaagtacattctcgactcctcggtctaggttcgactattttgcatcctccaagatcatcgtctctaaatgtcagctgaacattaatggtttgacaatctaaatagaacttgagtggctgtacaaaatggtggatgtcagcgcgtatcaatgtgaaaattattcaaccaacgagacaaaaggcgcaagaggacagccacttcatctgaaaggagtagaagagataatgtagaggcagagttcgatatgagagaggacaggtcatgcgaggagataatgttcgatcggagcaagagatggatacaagagggtgtattgatcaatcggggacatctcagtatttataatcagtccattgtagattgatgagaaaaggatggtatgtttcatagaacgaagcctctaaagattatgaggtctagatggtgatttgtaggagtcactatattcaacaagagaagatggggttgattgatagtaatatatcaaaagggaacaacaaagataaaacccaggaaagaagatacaaaagattgcgggaagagagggtagatgtgaggaagaacttctaagtttgagtaaagatggagaaatgtgtagaaagaaacgattctctttctgttctaagtattttattaagtctggaatatgtaaaggaatctgagatttagaaggagaacatcatcaaccaggggttgaggacgatagggtagaggatatggcaagcggcctgaacagcaagaggaatgatggccgtcatagaggtgaccctataagcttcagggagcagtgaagtcgagaagatgatcatgatgacgatctgaccaccagcaaagaggtaggccggccagaaacgcttcaagatggctgggacctccttgaagaagttggaaatctcaacctccttaatggtggatccccagagcactatcgagcaagcgagatggccgaggagtcagctctactgttcaagcgacatcaaatcagtagatagaagaaggtagactcactgttgtaagagaccaagtgagcgaccaaggctgcctggacgtgccaactcattccagagaagaagaaaaagaagaagaagatccatttgaactgttaatcggaaaggtgtgttcgaggtcagtcgatgcatcagcagcagaacgaaaagaagagggttcggtcgataacatacgtttgaaacgagcgagcttcccagggattcgactttgagtcgatacaaaaagattgaactacaaatgttacccgcgcctgagaaaatgacgatacaagctatgaagagaaacggaggtaggttagagagtttccgggaaattcttagaaagatgggtagtataagatacatacttaagaagaccttccaactttccaaatagaaggaggacagaacgtcctcgagaattccgatcaagaagaagttgagcaagcaaaggactgcagcgatggagatggctaaagagaaaaacaatcgattggaatcatcaacactgatcgcttttcgaatagtgaggagcaaatatagagacgaacaatagtaagacgagatataagcggcgacagagatcttggagtgaagagggatgttcgagaaaaggaacgtcttgaacagaaccgtcacgggacctttggtaaaccaactgtagcatacgcagagacgtgtcgatcatattaacgagggatgaacgagcaacatgaaacaaccatcgaagaacgaaagacgtacgacttgagaggatagaacaacaattcactgtcaagattccaaaacgtcagctttatttcttcatcaaggtgaaggtcaacaagatacgaagaaagaaaagaccgacctgcatccataaccgtacttctgccatcgattaagctcgtcatcacacgtcaacgagacaccctctttgaatcctccgttagagtaggtcgcccatcggacagtgtatcccttcatctgtaaccggagagccactgtaaggcatccagaagagagaaatggtcagcgcacggctctcttcagaattgtgtttcaaaggaatttgacatactatcgaagtcctcagaaacgtgggattctgatgcagagcaggaaaggcgaatagaaatcaatcatcatgatactgtcagaaaaattgcaagaagcacacgggggaacataccggaccaaattttggtgcagccgtcttccgtatcgacgaaacaagcctcctggacagcagaccacctcatgaaagcgttgtgaccgacgaacggggcgactgaagatcggataccatgattgatttcgtcaataaaaggaatcaaatggattgatagtgaatgacaatctacgacgaaccttctccattggcacaacagaaggaaatagctttgt

SEQ ID NO: 3176 - DNA, 8982 bp, Xanthophyllomyces dendrorhous
ggaaatagctttgttgattcgcctagtgaagtttgctattggatgaagatggcagaaaactctgattaaaaaaatctcgataaattttgacaagaaacgagaatgggacgaaccaattccaagctcgaagtaatgtccaatgaccaacatgacgtcggctgaatgaatcccatggaagaaggactggtttagcaagcgaatctccttcggggctaaagaagagaaatgcacagagaacgtacattcatgttggataatggcgcactcaggggaagcgtctaactcggcggcagcatctaaaaagcaatcctcaggtactcgagtatcagaatcaatgatcaaaatgtattctccactatatcaaagtaaaagaaagaagaggacaggtcaacatttttatcacacttcgagagaccggatgaggaagaaaactcacattcgaacgtttccagcggcccaagcgactccattcgattcctcgactgcagcggccagcgattcctgatagagagcgtcctcgtcctcgtctgtccagacccaagtctgttcattctcatctggaaccggtcggagttcatccatcaattcttcaattctcaacgagacagccaaagcaaagttcatgttcgaagctttcttaaatcgaccctttcggaggaatcctcgatgtccgtgcttgggtcgggcgacccaaccgatagcgtttcgatcatagtaggctttccgagtctcaacttcttcctcgtgccagagttgcataccgtcctcacaaatcatgatggaggcagttcctccctgtcgttcataagtggtaatggcaactttgagggattcgatggtgggaacaatgactccctcgagtccttccttgtagacgggcatgatgatggtaaagtgaggcaatcgatttcggatgactcgctccggagcctttccagagtagaatctgagaatgacagaaggttcagtattgggtcaaggataaggaaactaaacgaggctggattgaacaacatatgactcacgcagagttttggtagaattgagcaacaggaccgaacaactgccaaatgtttccgacgatcgaaatacagaagaactgtcctcgacacacacacatacacacaccatgtaaatgagttggttcttagtagagaagacaaaggaaaggacataagagatggctcacgaaccatggcaataacgaaggtgaatggagaggtgagcaggagaaggaatcggagggttttcccatcaagaaggaactccttgatcaacgcccgcgctccgagaccgacgaacatcaggttgaaactgacggccagaccagtaatgatcggggcatacagcctataatttagacaagaaaaatgctgagcttagttgagatttcgacgatggaaactagaaagacaggaaatacagaaggaaaagggaacaggaaaacaaagcaagacgaacatcataggtcgggttttcctggactctgcagaccattcatctggtccgacaccagcctctgcatcatgccaaagttgctcttcggtctcttccggcacggccttttctcccagttcaggaagatatcccaattcacttgagttactagcaccttcgaattcttcgaccttctcactgatcacgacggccttcttagtcatcagactttcttcttggtgagcagcagaggcccagacataggaaaccatctttgcttcaagcgtctcggcgttgacgattacactatcgacctcatcagaccagacgatcaaacatttctcggctcgggcgaacgcagcgtattgatgtttcctcgatcgaccgagatgagacaccttctcgatcacttgaattcgagtgttagcgtcgatggcaatatccatcgcgtggcgggacctgtgtgaggtgaaacagtacactgtaaacaaacatgatcgttcgaaaaataaccaggaaagcgatgaaagcttaacgtacaatcgggccatgatggcctgaacgactttactagtgatcttaatggcaacctcggtgttaagcgcggcaacggcattgtcccaggtctgaagagtatcaaagatctcttcagagtcgaatgaatttggatccgctcgaggaaatgtcctgagtgatagaagagcaaggaaagagtaatcagatgaaggtaggtagagcgataagaggattagacaagaatccaataaaaaagaaggtgatttacttgtagattccttttttcattcgaatactaacgacacccattcccgagatgttctcgctcttgaaccaaccttgagcgacacacctcgagtaaagataaccgaccataacggcgaatctatcggcattgtctctcgaatcatccccatcgtcctctctgaaaccagccggaaggtcactgtgtctgctgtgcctacttccgaatgagttcatacttctggcgatcgaatgatttctcctgatctggtaatgtgggtagggatcttcctcctctggctccgtatcggatgctctgtaagtagatgatttggattctctccgaactctgcccccagagggcgggggcctggagccgtagctggaggaattcgaggctcgacgagacattggtcctcggtaagaatcgatcgactgtcggtggttcaattccggataaaatgcctggggtgcaacggacgttcgtcggtttccactagaaatggcctggccgatgattggctcctcgtgcgcagggacctcatcccaaaaggatgatgtcggaggatccatatcaaggtcggtgagcggcccagcggtttcatcggcggccgcggattgttgcgggattgatggatttgacataactgcctaaaaagagcccaccacataatgttgagcgctcaatcgtgcagggatccattcaggaatattgaagaggacatgacttaccgagttaaagtccgagtttcaagtaaagattgcgtctttgttcaatggttctatagagcgcaagtgtgtgtgtgtgagagagagtgtgtgcgtgtgtgtatgcgtatgtgttaactgaagagtcaaaagggtcggaattcaaggcggtagtggtagttagacgaaaggtataaacgaatgtgtaatgtccttccttgcaaaaagaggaggcgagaagaacgggtcagcgaggaaaaccggagaggacgaaagaacaagaaggaaatgaacctgtcgagtcagcagagtcaaaggcagaatatacaaataagatgaaacaaagcttttgactaagaactcacaaggttcaaaccgatggcagtgtaaccggtagcgtgaaggtgaaggggaaggggaagaaatgtggaaggacctgcttccaaaaagaggaattgttcaaggtggttttaagagaacgagggccaggaggtgaagaaaagggcgcgcggagaggaggaaggaagagtcaagctttgtacgttgagaaaaagcgactgaattgtatgggattaagatgagagacagtggggatcgaacgagagggaagtcggaggaaagagaagggaacgaaaagaaagacaagagtgataagaaacaaagtgtcagacattgtggagagaccgaactagagtcgttaactaaacttacccggagcagcgtaggagagagagggcgaagaaggaagatgaggaagaggagaagggattgatcaggaagaagaacgcagacgacagatgagttaaacattcttgtactcatctttggcatgagaacctgttgaaaaaagtgagtccgttggcgttgaggttttccccgttgagttgagtgttgagacactcaggccttcgtagcaatagtcctgtcgatcacttcccacgaggcagccacaagcaggtcttcgtagaattagatgaggctctggcactgtttagttccattaggcgtgaaacggcagtcagatgggcgactcaaacgttgtggtgttgggattaagtcaagcacatgctaaactatcaatgaagatcaagtatcagtgtattatgaaggatgccatcataggcatcagatgagagaggatcgtcgaagggagaaacaagaagaatataaggaaaggagtggaatcttcagccaaccccacacgctgacggagaacaagaagacccggtcaccggttaatgcctcggcctgaactgcgcttgatttttactgttagctattcattccaccgagagtagacgtagatttaaaaccctaagaaacaagaagaaagaacaaaaggacatcacgtcgatcagacagacgattcagtacattgattcaagacaaacagattagactcatccaatgtacaaagaggtttacacagccttacttggatttacgacgcttcttccacttctgtatctgtcatccaaccaagaatcaatcagctcccaaccggatccggcaaacagcccggtctgatgaggagagcagaatttgaattgaacttgaaaccatgagaagaagaagagtgagatcaaaaacacgtgggaatcaagagtattcgtgtgtgagaatacaatataatggagtaatgtttatcaacacatgggacagaacatggagcattgagtcttgaaaactttaacatatgttgtactttccgcccttcagtactcatccttcctcggtcttctatcacattttctctccgtgaatcggccttcctcttctttctatgctcaagttttcccaccgttcatcgatcaatcagttcgttccactgctgatcgcacacacctcagcttaattctaatcggcagcccacgttatgctgtctttgacccttattaatcccgatcttcgactcttcgcccaatcgctatccacgttctctaacgactgcttctatattcgtgtctctagattctttttcaacgtttttgtctcggagacccacagtcagctagggccgaaactgatcaagggtcaatcttcgtgtttgtctagaaccgttttaaataaaaggattgggtcccaacaaaaactacagaaaacaaaaagggtaacagaaaagcaagacgaagtggaccatcagaaaattaaaaccgctctggaggtattcatttacttgaactgtggaaaggcagaggcaggaagaaccagtcagattccaaaatgattattacagaacgaaaggatacaaaacacccagtacgtacgttctttccatcaacccattccttgtctccgatcttgaggtcccaggcaagagctccctcgaagaaggtcttgtcggcctcgttctccaaatccaatcgagtgaactcgtaagactcccaatcaggggcaacagaaacaacggggacaacatcctgtcctcggaggatcaaagtaccggtgatgatggaatcgttggccttgccgagaactccaacagatccgaaaaggtactttcgggatccctcgaatcgagcaaagagacctccgatttggttgctgtttggacaatgaacgcaacggtaagtatgtataccaagcgtgttatactgcagaaaaaaaaggacgaacgaggacatgaaggtctgagtgagctcagtgttgtacttgaagtcgatcttccagacagagaatccctccttgtcgacgttgttgtagaaccaaggaatggcaccagttcgggtgtcctcgttcgagtacactcgcttccactcctccaagttgaaggtggacttggggagagcgtccaaggggttctttccggcgggcttgtcggcgaaagactcctcctcctcctcgtcaacctccttagccttaggggccttgggggcggcctcagccttgggggccttgggagccttaggagcggcctccttcttgggggcaacgtaggtagcggcctcagtagcgagggagacgtccgagaagatggaggcaatcttggggtggttgatcacactggttgtgataaagtttttaatcatgatcagtcaacctgcatgtaagacataacaaatcatcgagcaaacaaggcccagaacgtacgtctgctcgaatcggacggcgttggagaacttcttctggtcctcagctccgtagtgccgggagaaggcatcggcaaggacggaggcgacggtgatgtcagccaaggtgattcgctctccgacgaggaaagttcgggtggaaaggtagttatcgaggaaagtgagagcggcggtgaccttctcaattcggctctggaagacaggctgtttcagaagataagaggcaatggtcaaccgaagatccttttttatctatatatgtatatgcaagcttaccttgttgtagggaatgaagttgttgatcataccggtagcaacagagattcgctcgttgatctcagtctcggcaaaagagacccactggtcgatcagggcagcctccttgggatcagaaggaataagaccagagttgggggcagatcgggcgactatgattcatttttcgtttatcaaattgaaccgaacagtaagacaaatacaaaagaaaataaggataagttctcaatcaatctgatatgcaggtgccgattcgggaggacaagtaacaaggagtatggtttggaaaggacacatcaaccatgctccagaagatgataggtacaattgacgagtgatgacctaaacagacatggtcgaggtctgatttgaagagagaaagaaacatacggtagtaggcaatggcggttccctcagtgagcttgaagtcaccctgctcgagggccgggatctttccgaaggggaactgtagatccaagagggaaaaacgattgatgtgatcagcctacaatttctcctcggaagatgactagagtgattgggcaatctaagcttagagcattgcccttctggtcgcattgactatcataattaggtcactcgacgcccaacaataggcgttgctcgggctaagacgataggaagcgatgggacaggagggggaacgcaaagagagaagaaaaaaaaagaatgtctagaaaaacgaaccttctggaggtaggcctcagccttctgctctccgctctcgagagtggttcggttgaggtcaaggccagcgaaagcggcagtggccaagattcgtcgaaccttgaaggaagggttgactaagggatgaaatataagagtaacccagacagattttgtcgaccgagatgagacgaattcgtagaaaaattgagagaaagcaaatcagtgcctgtttcctttccctttttcacttctttaatacttgcagtccacatcgtgttgactaacaatgacaaaaaaaaatcggacaaaggacgcaccaaaggagaaaagagttccgtcagacattttaagatgggatgaggaaagaagaaaagtgaggatgggctgggtggcaaggcaaagaaggggaaagagaaacgaaaagaaaaaaatctggcagaaaagaaaaaatgagggagcggttcgcgcagtcaatcagcttatgtaagccatctcccttgggagtgcctgagtgtctccgaccatctctctcaattgagcccaactggtccttacactcaccacgctgttagaggagagtgatccgaaggaaattgatctagagggaatttatttagatgggtcatagcacagaggcctttacagactcatcagagtaaatgtggaagcaggatatagaacgaacgagatagatcaagagaaggatatatgatcttctgcgtataattcatacggtggtcctcaatcttgccagaccagattggagaggctggttccattttgagagcactcatacatacaccctctcgtgtgcgcagaaaaaggataaggaatttactcatggaaaggaaggtaggcatagattgatggaagtagcgcatataccgatgagaatcacttgacgagattgacacacaagaaagaagacatagtggaaattggctgccctgcttttcttgttcagatttattagcttttcaagaaatttttaatagacttgtctcgatacactcctattactttttctctccagattctcttttttttcgctttgtctcttcctcctttcttttctcctcgataaaaaccccatccatcaaagagaaacagtgaataggactctcctcatcttccttcctctcatttttccctcaacaataccagtagaattcgggcttgtagttagagcaggaagagaacagagccttgccatgtccacgacagaaaccccttcgtcaccaccaccagcaaacagctcatccaacgagcactccgctgccaccatcacctccaccaccattaatattaccgataccgttgacactaacacccctgcatcctctcccctcaagaactccaaggacagtcctgctaaaccatcaatccctcctcagacatcttccgaaccaaccagtccggtcaagccatctctggatgttccttctgccccgtcggagggtggtaaatcagctccgccgaggataacgaacggagatcaggtcgagaagactctgaagcggaagttggtccttggggcagagacatcggtacctgaacaggaatctgaaggcattaacctcaagaaagtcaaagaggatggcgtgagtgtttgtttgatgccttgtttctcaacccatctttctttctctcctattctctttcctccgtctcgcttctttttttttccttcgggatgagatcaagaagcagggggagatcggagcgatcaagacgcttcaactattacagaacatattctccattttcaagagaaggcaaagaatgacatttttatcgtgtagctctcatctcggcatctctccttgagccatgttctttttggttatgccgtgtcttcatctcagcatgttttgacgtttgaacacaatctttgtgaatcattaatccttattataactcattttctgccttcatgaaacagatctccgtcacatcgtcctccgaatcgcccgtcataaagcccggaattgttcccggaggtggtttttcttctttcgcttct

SEQ ID NO: 3177 - DNA, 7742 bp, Xanthophyllomyces dendrorhous
cgatgcttccctgctatatcagcaagtacaggaagtgccctctgggcgcgcaggttcgaatcctgtctacttcgtttttttttacgttgatctgcgtttccattgcaatccaccctttttaatcgtggttcaggtagttatggatcgagtatatgggatgcatgtcatgtataaaaatcattcaagaaaggagggcaggaaccagacaaggctgatgctgatcaaactcaggacagacagaaaatacaaagtactgggaatattacaaccataaaaagaacatgcaagcaacatgtcagaggataaaacagaaatacacattattctcaatcgctcgagatagaatcgacatcatggaatggtctaatgaaccaagtttgtagatagtggtcagcacgaagagtaaccaattgagaatatctaaaaatcctcttgccaggagccgcactcacgtgtattcaatcccactcctcgcagcctgcacaaccaacccaaaggaacagaagttttttcgagatcaggaacagcatcactacagcatgatctcggcaaagaaacaacacacctttagcatccactcctcatccgcctcttcaaattcataaccccttcctccaaatagtgagagcaataccggcaacaaaacaagtccgtgtagagcaccactgatgatcaacgaaagccacattcggaagaagtaaacctccaagagttttgatcttgtgaacgcaaggacagtgactccgataagcttagtgagagtgatgcccgaaaaaacctttgaatcgaaaagtgaagatagggtcaggccaacctggttttagaaatgagagcatacagaaagagaacaaggtaaagtaggacgaacggatcctccaacatcgaccagagcgctccaagcgcgttcgtctcgctctttcggacctagaggatgatcgtaaggcaacccgcctccgccagcatccatgaatgcccgagcgatatgcgagcagaattcgaccgcaatcccaagagatattactaggttgacaagagagatcgcactgtagcaacaggttaagccgtcacagaaaacggatgctcagtcagtcgttcgaacttcacataacaaaccactatatcgatataatacatacttgaggctaactccccagacacccattaagcccatcacgctcgtcaccgccagagcgcagactccagtaacgatcgttcccgtcctccacgagcccaataagagtgacgtcacgaaaaagatggacaccagagccaacgtaaggacttcgaccaagatggtgatgacatgtgcatactgagcgaaaatagaggtcaacagatgatcaaccatatgtctactttcaatgtaattgctaaagagaggtccaataacgaggacaaacctgatcaaagaatatatagaacaacgagtaaggatatactcgagcgccgattctatcctccatatcctttgcgatccgtcgagcggaagccaatgcgttgataaagtcccctccctttttcaatggtgtgtgatacgtcctgaaatgagacgcttcgatggcgtctcggctctttgagaaagatagtgcgttactgtacgacgaccttccaccaagaggacagttttcatccgtcggggtttgaagccattggccaaggtatcgcatgaattctgggccttcagggaatccttgcattgtagtatcaaacggaggatcacgatcgagaaaacaaggttgacatcctcgttcggattcttcaggcgaacagaacacatctggatcgtcttttctcactctgcaacacgactcgagtacagggttgagccactggaagaaatcgtcgatccagacagcaggcgcattagaaaggaatgaaacctcgggtcgtttgcgttcagcatcaagagtagaagcaacagagagctcgtcacaagtggtaaacctaccacacaacgcttgctgtgcgggtcgttcggtgacattgagatgatccactacaaagtagacaggaggtccgatatcaaggtactgatcaaccgcgtcaaagtatgggatcaaatatgaatctgatggtagagccaaacgttgatctgtcgtccaccaggaagggaaagtaacgcgtgtcagcttctgtagacaggtctatcaacacttaaaccaatgaacaaaaattcaacaaacctagtcctagctcgactttctggacaccgactagagcaagagcaaacagccctgaaaatatgagaagaacagccgatttggtttcccttttgagcaagaacggtgcataatactttcgaatgactctgttgatccatccctctccattggaagcagggaacccagcctgtatttcatcgtcgcccccatcgtcttcatcatcatcctccccatcctcattatcaaccgtggactcgagatagatagcctgctcaggatccaacttgatgaaaggcagacaatccattctgtgcgcctatttgaactcccaaaatgcggatcaataatccatcactctcttccaagacgactacgtattcctaaaataaataaataaacacgaaaacccttacctcaaccctctttagatccaacgtcagagcagccacaaagattgttacctggaggatcgcatcgatcgcgacagacccagccgcataaagcgcgaagttcctgaccgctggcattggtactaacgctcctaatccgaacgcgaccgtctccgtaagcgagctgagcaagatactaggtcccatcctagctaatgtccgagctacacgttcctccggggagagatacaactcagtcggcgcttgggtctgttccgccgaagcaatggtgtcgtttggtccagtggaagacgaggatggcgtgatggcaaacgggtcctctgtgaaagattgaccctgaagataatgggatgatcgctgttgaatagaactgggcgaagcgagaggtccgtgcaaggcgttttggcggtcaagctcattgacgagaatgaaaacgttgtctggattgtgaaacgtagaagactcagctttgtctgtgatcaacaaatataggaacgagagatagaagaactcaccaactccaacagctaagactaagaaagggataacctccgcgataatcaatgttactttgacccctagagctgaaaacacgccaaccgaggtcgagatcgagatcaccacaaccaagattccaaaaactcctagggagaacttggagttgatcaatgccgtccttaacaaattcttgatcctctgacgtctgcctgctgaccctccccgttctttctccctcatccctaaaacatcagttagcccgaatagactagcaatccagctaatcaactctatcgctagtcctatgaggcttccaccttgagacccccctaacgtgaatgtcacgtaaaccaacatgcccagataactagccccgacgacaagtttgtcaaggttggatgccttattcaactcttcttctaaactgacaccggtggaaaacccgatccaagcacggcctgcttccagttctttgggcgagttcacaacgtcctccaaataacttcttaggctgcgttcccattcctctgctctaagtagaccggcttcgtctaacgttccttgcaggacgaacgtcgtgataaaactcgaaacgttcaaccaattagttgactccgacggcagtcctcccagaataaacttcggttctaggatcattccactttcggccaggcaatcagatggttgatctgaacatcccttaatgacgtcctgccattcgtcctcgtcgacctctccgcccgtgagggcatcgaaccagaccgagatcgactggacgatacaagccgtacctgggccggctggagagtaacacacatcttcataagtataattgttgggtattgagcgcatagacaaaatcgttcgttcgtgttcaagccaccagttaaggcgttcgtatgagagagcgggttcgataggcgttggaatactagctgttccttgtctgtcgggcaaggaagcagaggatgaggagtcggtaagagaggatgtgatgaagatttgttgaggtcggaagaaagggccaaagctttgatcaaaatgattcttctcgagcacgggtgatgacgtaggagaaacccaaagatgaactggatcagtctctacggagaaccgtttccaaccgagattaagaagggcgaggaccagcaacgcaacaatgaatgttgtatctagatgttttgtccatatgagatacaagaaagtcaatgatttccatcatcatacaagatagcaagggacagacgaaatccacatgacttacaagctctctgtgcgcacatcaatcccagtcggtaaaagcccttcttgagccagacattgactttgctctgtctaggctgcaaccttccaatcggatccaacaagcttcctaccctagccctgccgtcgtcatcatcattcgataatccaagttcctcggatccgatagtcgtcccaaacaggtctgacgtgcttcgtctggacgctccaggcttatgcctcgtgcttgaaggactgattactcttccatcttgagcgtctacctctgtatctactcctggctggtcgtcatcgcccaataaaatcctgcgctcccagctctgtttcttcttctttgctattcgatccattatccagagggatgtgacaatcaacacggctgccaagtatgataacgtgacgacgaacgatgtacagctcattcgaccaatatgacagcctggaatgggatccatcctagattcgcctgatggagtcggcaagtaaggcaacgaagggcatatcgatggacagtcggcacaagcgcatcgagagtagatctctggatcatcgcaatgcaatttggtcggactgaccggggaccagcgatcctcatcctcggtttctggcagcgaagaaggaaaattgatctggaatgggctacctaagccagggcgtagcttgcccatatatcgtagaaaggcttccgggtctttggcaccccctccaatgagatccatagcgagaccgttggtagcaccaaattgaacatccttgcaagagtcatagaaggactgtttgaattctggagagacatacacgttgatctctttaacagcttcctgatgcggactagatggcattgtctgggtagagagaacttctaaaaaggtcgattgggaaggtgaacatgtgaagtggcaatagaacgatcgaaatgagtttcggcaagccggacaggcagcgatgaggctgtaggcagcagagttgcacatgatagaccatccagtgtcagtggcttataaccgcttcttcgagaacaaatcaagcaactaagcgggtacaagagcttacggttcggcttggaggaggttgtctctgagagcttcggcttgatcgatcgtacaacagaccgtgtccggagtctcgaatgacgggccgcatatgtccatgagcattgctttcagctctgtcgaaggctaaataatccataagttacaaattcgtttgtccatttgatcgtatttttgaagataatcaagaggagagaacgtcagatagctctggtacatgagtgaatctatcagaaacagatacaagttaaacggaccgaatcggcatcgccatcatcaggacaagggagttccggatcgaatatcgattttttgccacaggatcctctgattgagcatatccctggtccgtgtcttcgatcgaccaacgacgtggtcgttatgttcatggcaagtgagcaaggaagtatctcaggtacgactgtattgaaatgtcgtgggtgattgaaggtattgatgggattgatggtggagatgggctatatgcggtccgatgacttaatgcagccatctcggaatacaattcatttattctgaacacaacttatctaaggttacagacggcaccgtgaggggaaatctcctccttcatcagccatccgttctcttttcttttacccatcctctcactcctctctatctcttttaattctctttctcaaggtcagtaaatgttagactgcattataagaatggtttgaagttaggcttagttgactgtagagcttctcctgacgttgttttttctttgaattttcttcctctttggcattctcattttctcttctacctttgaccacgtctctttttagttcaaagatgtcttcccaccccaaagctttcttccctgacttgtttggcaagcgagccttccctactcccgtacgtctgatcactgtactcttttcgccgattgttgctgtcctcaggcatagcatattcgagatgagcccttcttcggagagaagcgagttttaaagatctgctgtagatcgaccaatagcccatgttgacctctacctttttctcctttttctgctccttttgttttcaacaataccatcaatactctttcttggaatgcatccaacttgaacgaactcatccatctgtagatctggaagccctacaagttcctctttgtcggtttggccatggccggttggggaatctaccaggtccaagagattgccgtctctcgttcgttccgtctttaaattatcttttggtcctctacggatgaagtctctggatgcatagaaggaagctgatgctcaatctttatgttctctttgctctgttctttatgcgtctgcaacaggacctgaggctttgaacgacgtatggccgttctctttccatttgcatatgacgggtttctcgaacatcttctcttctcacttggctaacattcttttcttttctatcttcgtgcttatcccgaatgcttttcacctcttttgtcttggaatgactagcctgagaacccctaccgttcgtcgaatttcatccatcccgctgaatctttgtctttgaatatggaaacaatagagctgaccatttcttttctcttatgtcctcaaccctgaacgccttctcttcacttttggtcaatgtatattctgatcccctttcgaccaaccctctccgttctatctcaatcttccctaaaacccctgttccactcatacctttcgactcgaatttgccaaccaataggacgacgaatccttgctgcccaggctgccgctgagggtcatcactaaatgcgattgttcttcttcctggactcctttaaataagagtcttagaagcgttggcgtgattggatgaacgaatcaagtggatattgtgtacggtgagatgagaaggaaacgaaatgagatatgccctttcagttctttgttcgtactggcaacacaatatgtttaagaagcgaacaagaaggagtcggtagtattttaaggataaaaattgagataatcagcattggatggtttgcttatggacacagaatgtcatatttttactagagacacacgggagctattactctcgtatccaacagtcgtagactttcctgtatgtccaagtctttaacaccatcatcacatcaaccaaagtacttgtaacaacgagcaaatttctatgatgtctatgttcgaataacaagaatatgtacggaacgatgaaagagacatagatgactggaaaaaatcgaagaatgagatgcaaagaaaaaaccggtagaggaaaaaaagagatggtgaaaccccaagttttccttctcatttagtcggctgtcgaccatcatcttcaataactctcctactcttcttgctttctccctcttcttt

SEQ ID NO: 3178 - DNA, 9326 bp, Xanthophyllomyces dendrorhous
tacatcgaaggtaatgcgtaaatggggtgactctgccattacctcagccgacatggccgctctagatttctccactcctcctccttcctcaaccactctacccgacggctcgtctgttgctcagccatcccgagcagatatatctaaactagtcgatcaaacggcgttaggaatcaaaagagacgggttgtacgatgtcaaagacctggatagcacgttcgacgaaggagacgacgaggaggacgatatgatttcaagagcactagctgaaggttctgctgcagctgctactgctgcttctggaaatggctctacctccaatatgtccctcaacggatcagactcggccacctccggttcgaatttacttggccagaagtctctatctagctttttttctaggttgaaaggaacgaaagttttgacaaaagaagatcttcaaccggtgctggaagtgatggagaaacatctgatgggaaagaatgtggcaaagggggtttgtgagagggtatgtgaaggagttgagagcgcattgatcggtcgaaagttaggaagttttggtagtaagtcgtcgggcttcattggatttccctttgtatccattgtggccgtcatttttaaactgatgtgaatacatgtctgataggtgtcagatcagaagtccgagcggctctttcccaatcaatcactcggattcttacccctaaatcatccaccgatattcttttggaaattaaacgaaaacatagcgcatctgccaatgccgccgaagctttcagtaactcgacgtcttctaactcggaaccatacaagatggtgtttgtcggtgtgaatggtgtagggaagtcaacgaacttgtcaaaagtttgcttttggcttcttcaaaatgagctcaacgttctgatcgctgcgtgtgacacgttccgaagtggagcggttgagcaactgcgagtgcatgtcaataaccttggaaggctgagcgagcagattggggaaggcgagaagaagggtagagtcgaactgtttgagaaaggttacggaaaggacagcgcgacaattgcgaaggaggccatctcgttcggtacgttaagctacgtttgatagcattgcttcattactgacgcgacactgaacctatcgcttcggtttaattgcccttttcacttgaatcctcttcctagccaaggagcatgcgtttgatgtcgtcttgatcgatactgctggccgaatgcaagataacgagcctctgatgcgagcactttccaaactcgtgtctgtcaattcacccgacaagatcatatttgttggtgaagctctggttggaaatgaggctgtcgatcagctcagcaagttcgacaggagcttgaaagagttctctgcaaagggagggaaaggtaaagaacgaggaattgacgggatgattttgaccaagtttgatactatcgtgagtatcggatatcagatctttctttcgccttccgcagaaaacgggcaaactgacaaccaatgggctttgcttctgtgcttttcttaggacgataaagtaggagcggcactctctatgacatacgttaccggacaacctattcttttcgtcggctgtggtcaggtacgtccaagttcttcgtcttcatatgaataagaggcatgtatatctccgatctgattagttcttgatcatctccattaactatcagacgtacacggatcttcggcatcttcgagtaaatcatatcgttcagtctctgttgaaggattaattccatatgtgccctttcagcgtgatgatcaatcaaaagtgcttcaattctttgctagtctttcaatcttattctcttctgggcttaatctctacgtttgcatattgttgtataattctggtcccatgcatctgtttaatttcaatcagggaaggcatatcatcattatctatcccttctgctcaataattttatatgtaggaggaagatcgatatcaacaatgaggtataatggagcaaaaaagcccgggaacaataagttgagactgattagatattcatgatacaaagtgagaaaaaattgccataagaaatatttgcattctctgacgtctcttcctgattatctcgtgatctcctcactcctttacattgtattcgaccaatccattcaactttctttgaatcccggtaaaacactatcttgagctacctctattaggatttctacacagacaatggtctttcctaaacctgcagcttgtcagatttgcaagacgaacgcatcaaagtacaagtgttcgacatgtcaggtcgtctagtcagttttatttcgctcttgtctgttgcaagtgattgttcagtacataaaacgagatccatccattacctgaagagaggaaaatgtaagagaagaccatagttgactttctttgttccaataatgggtgggagaaaatatagttgttcggttccttgtttcaaaaaacacaaaggttcgtctcgttgttagacgttttctactctacgttggttgtttcttctgtgctctctttctatcctagatgattggagctctgggtatgacttgttttcgggctgaaaaaagattggaatggccttggtagaggaatcgtgctctcatttacctccgccgtccgaaacttctccacctgtctcttccgtttctcttcctacttcaactccgacctcaacctctgacccaaagccgctaccggtaccgataacatcaacatccttaccggaacctccgtccgagccaattcctcttcggcctctctcaagtctcaattggcctgttaattctgatgggaatgaatgggaagggtcggggaacccgctggaccgggatttaccgaaaccactccaaagggaggatttaatggctattggtatgtttgctaactgtgcccacctaactacgttctgtttgaagactttgaactgacgcactcgatttgaacgacattgactgcataaacagcaacatcacccaagatcagagaattacttgcaaacccgctccttgctcctcttctttctcagatcaacgacctcccctcttcttcattgtcctcttcttcccgtgctcattctcactcatcctcacgcgctagctctgactccttcacaaggtcagcttttcttcagcaagtgctcggtctttcggttctctctccttcctcgtcctcgaatttggctttgaactctaccccacacgcctttgatcagagaggacggcctaaccgaggtaggatctcacgtggtcgaggcggacgtggaactggtaatggtcgattccaatcccactcgtcagcagatactagactgggatcgggaccagggataaagactacatccgaagagatggaattgatccggtcgtttgcattggaggttgaacgagttttgaagggcgtgaggaaagaacggcgaggggtagagtgggaagttgttggacctgacgatgacttggttggtggactggatgaccaagaggaagaacaggtcaagatcatactctgatcatctgcttcaagattagaaaacgatgttttatactgttctttctgctatggaaagaaagactcaagacgaacatgcgataggaatacattctgatggggcaatggttgccgatacaagaagaaaagaaatagagacttcgtttggaaagatatagaaaagaagaagaagaagaaaaaagaaaggaaaaattggaaacagcataaatgatgcagaactatttaaagcgcatagatggcaagggataccacccaataaggaagaacaaaaagaccagatattgaaaacggtgtctagtgaaccttgcctagagcgacctccttgagaccagccttgctctggatggtcccgccgaggtaaccttgccagttggcgttgaacgcttcgacgtcaaatgttttctgatcacactcctcgtggctctggatggtttcacgaggtggacctccagagcccttgataatatgaggtagattggatgcagcccccatatgctggtaatgtttgtagatgatttcaagcatacggccttctatctcggataaatgggtgaaaatgaccaaggaggacgtcaatcctgcgcttatcttgcgtagatactcaatagcaggataggagctttgaggacataccttcgtagtcgtactcatagctgactccaagcttttcatttgccccgactttctcgtggtccttccagacgtcacccagtgtaaacgttttctcgtcctcttccgcgacatcatcgtcagacctctgggaagagggagaagcagagatcttgatcttgggtgagccccagttctgtacgtgcttcacctcgggtgaggctgagacgagtttaatctgacccagcgcggtgaacttgtgtggcttgatatctgaccagccaaaggtgtactgaatgagcttgtgtactgagggttttaggaccggaatagagatgggcgtgagtgatgaggcgcagacgaaaatgagcaagaagctgaagcaaattacgtacttagttcaaacgagtagtttgaaggaactcgaattcttctataggtagcatctgtgtcagagaacacaaagtcctgaattgaaagccgtttctatcagccatatggttttcggcagagagagaaagattgaatcttacaaggacgagatgggactttgtaggttcgggaaggctgaagtcagacatcttgtatatgtttgtctatgtttgaacctgagaatgggctgatggttgagtgggtgtgaaagttttgaacgattgatgtaatggacgtgagatgggaccggatggaaaagaacaggaaggagaagagatggaaactttgattatatacagtctcggtctcgtgggctgacatcgctctggatctgacttggcctatagggacgggcatcgtcagggcacaggatccgtgcatcgctccatgcctagtctgagaggccaatgcgctgttgtcagatgatccggtcgagctcgtctgatcagctgctgcagcaacataggccaggtagttaccatgacaacgaggcaccgtccgactccctcccccaacaccggtcctttcctgagtcttccccattattgtcgactgtgtctatacagaataaatatatggctttggttactagaaagtaaccgcaacgtaatccttttggcttgggtgccctcagaccagaaaccacccggatcccaccggtcacgtgtttagtctgtgcctgccccaacctcatcctcaacagtcatggcagtttcagcagcagtggcaaacatcagcagcaccgatcagtgctcatcccggacgcttgtcctcgtcactccgacttctttttgtcttgcaggctgccgagatggatgtctgcttctttgcaagggattccttctggtcggtttgactggctgtcggtcatgatgaacagcgcggtgaaggctctgcagtccacagaccacagaccaagacgtgaacagacaaagatatgaacagacagagatgatgtgtttgatcgggtcatgtgcagctaaacgtagtatttatcagtactcacgataccaggcacacaacatgaacatcaaagtagtcgagtcaattcaccactaactctggcatgtctatctggataagcttgggtgtcgttgtcttcatctagacttctttttttcgttcctcctccttagggttttatgcatttgctctttcaagtatgagtcttactacttcgatatacaagtctcagctatgctgtacaaagataaatcacaatagggcagctaatctctccgtaatgtttgacagacgatttacttccactctttcacttgttgtttcttctacaggtctgctgaatatttcagaacgagtgacccttgaagggttggtcaacaaattggctgattgatagattgatggactaatcaacagactgttcttgactttatatacttccttacttttgaatatgattgctgagtgagaagttcaaatcttacgctatctatgactgagattgtgagaaactcagtaaacagctatcgacgactttgaacaagaaatcagaaagcaggagaagagaggtccaggaagaagaagtaaacatgagaagatcgtaagactttgtgaatcaagagaaaaatctgaatcgcgtcaaactttgacctcggaagtttttacagatcgcccgaagaagaaatttgcacataactctatttgatttaggcctatatggcgcaaactcgcgtatgcttatcagcttgggataaccaagattctggaacaattgtagatcacgtcccgatacacagaggtgatccaaaacactcatcagtaaatgagcccgagaggaccagaccttacatttcaagcggtgggacgaggttcgaggctacggtgatttactcctgatagcaagcctcctgcgaaactcacgattctctgccttcctgtcttccagtccctgaagagtcgaaaccaagaacacgttacccaaacgaattttcgaccagcttcacctctcgcactttctacgatacatgttctcattttgagttcaatttgtttatttgtttgggcttttctttcgtttacgcggggaacactttacagccaccgttcgttttctggatggcgtgagtctacacttcgggaatagaaagaaaccatttagccgaaatttacacactgaatgattggaagcagagcatgttctctttcttcttccgttgggatctcgctaatgggtgctgtaggatgaaccttcaccgtcccacgttgataagtcactgatcgcaatattgtttgttttgctttgctttacttctttctttcctcttgccgttcattcagatcgtcccggacgaactacttttgattctgtccctcgtttcctccattctctttccctcttgacaaacatcaaacatcgtctttctcttttccggtctccatccgctcgctcatcactttcccgcctccctctcctttcttcacagactggctagaggagagcaagccaatcctggcttatcggaacgtactcacactttcacgcactcacgcacgccctcactcatcacatggctccaatcgacattttctcaaccggtttgagttcactgatgacccggtcgttgcccacactcaggagtccggagatgtcgtcttacgatcagaagttgaagacagcgttcgcgatttttcatatcttcaccatcagtactctcatgcctttggtccttttcatcatgatcacaggcatcagacggtctcaagtattactcaatgtgagtttctctgtctctgtttcgttgttgtttcattcatgatcagaaagggatcaaatgttcgaaggaaattcgtaaaacaccagaagagtcccgagtgttctgatcatctgaagaatgactagttggaacccctaagagaatacaaggtcaacaaataaacagtcaattgattcagccaacgatcacctcaatcttttcatcctctgtttctctgtcatttgctgttttggttctgatatttgtttcttgatctcccattcgtttcgtatctgttcctcggcctctgaatagctgtttcttgccatgagcgttaattcagtcatggacctgctcatgtatgttcaacccgagctttctcttgttcaaatgttagactcactctccatattaaactcaatacgccttgtcttggatcgccgtgacaacagggcgttttctccggaatgtccatcgagatttctctgtctgttgtcttcgacaggctcgatggcaggtactgcgctcatctcgacagccgtcatggtcacagtcctcatggtttggggcatgcttcgtagggcgagtgggaagaagatatggatggataagtattttgagctcatggttagttccctctctctgagccagctatattgatgtcttgattgctcaaagtcgcgcaccacacactagctgcgatggctaccatggatggttttcacgctcatccttctctcgaatcttgctgtgagtggagttgtgctctatttcattctgatgttattattttgactccaaatgactgatttctaattcaacatcatttattgtgatgaaaactcgctgttcccatcttgctgacaattcatccgctttcttacaatcgtgcatctcagtatctgctcatccgtccagagctcctttatgtgagtacgatgacatgttattccgataacatctggtgaggccgcttccctccttatataacctgcttgttcgttgtcgatcgcagagccaacctatgcttttgtctgtagtgcgacagcgtcacatatcgtagcaggcttggcattattcgttgctctcatctttgatagtcagttatttcgcacccattttctgtctgtgtctatcatccaaacttacgagatcccgtttttatatatctatcagtctggagtgtagtcattcttgtccgtcagagacgcaaggcaggaaagaaaacggcagtagaaagagagatggagtggtctcttcgatctaccgattcggccacaacagtcaacttgcctgtcgtcggccgggtagtcgcttatagtctgactatgatcggcgcgctgatgtaggtttccctttcatcattacagtgtcaagaatcgtccttaaaactatcattctgattcttacgtccttggatatacactccagatcggccatcatgctgtacgccaaaccagactctcatattccagcagtctaccaatccgcctgcggagtcacatgtttccttgttttcggcacccaaccggatatttggaaaaccgctcgtcgactggtgttctctgacgcgtcatcatcatccccttcaaatcgaacgaagagccgagcatcggaaaaatcatcgctaccatcgttcacgccacatccatcttctggcgagaaaggctctgacattatggtcagcgcagtttccgtcctagaagagcgaccgtcattcgttctatccgtacaggaactcggtcgtgacaaccaaatagccgaggaaacacgaccttgtcgaccttctccgtcagactcatcaggtgactctgttttaaattcggatgcgacaatcgatgagaggaagacccgttggggatcatcgttggatcatctttcagactcaaaaaattattcagcatcagaaaatgggaaccatcggaagcgtttgatagacaaatatccgcctgaagccaagagcacaaaaccgatgggactggcagaggcattggctgagttagagtctgaggtggatgagagtcgccgttgatctataacac

SEQ ID NO: 3179 - DNA, 1606 bp, Xanthophyllomyces dendrorhous
cttacaggctgtcgagatggatgcctccttggtggccggagatctcctttgatcgggcatccttctggtcgattcgactggctgtcggtcatgatgaacagcgcggtgaaggctatgcagtccacagtccacagacaaagagaaaagtatggtatctcagtcacatttccgtacacgcccggggctaccgttcaagtctcactgtttgcccagctggctgccaagctcaagcttaagcccaacgcaacctacgcctacacttttctcgagttgaatatttcttgttacgacgattaacagccgctcaggcagtagaggactaggcgttggaaactggcattttgttcttctcgcagaacattggctgtccatggaagggggtcttcgtccactctgtcttctttctttcttgtttgtttgtttttttgctctcgcttgcaatattattgtctcataggttgatttttcccttcaaaaagttcctttccattactcgagttcatgagtcgtaacgttttctctctctaacaggaccatgcttgttttggaaagaatcgtaaccgtaagcgacttgactggaatgtcgacccaagctgcttgtttcttgattcccttgtaagttgcttcgtatgtttggattagaggcatgagacatacgtcatgatagcgttgacccagcatatagatcgttattatgcacagagatgagaaaagacaagtgcaacggaaaaagatatgggcaagggctgggtgaatgaactcataaatgtgatacacgatcataatatgattaggacaatgggggtggtacaaattgttcagaagcaaagtgacagggtgatccgatttgggtcgttagtatatgaaagatagattaccaatcctggttcaaagaaacagagacgagagggttggtagaatctgaaggtaggaagaaaagacacaagagaaatggagagatcgaacagcgtagaatgaatgggcagccaagacagcgatattgtaagtcgaagggaagagaaaatgccgtcgccagactcaaagtttcgacctactctgaacgactcctactgagagagaatcagtcgactcaaccgcagaaggaatgggaggtgccgtaggcacgttcgactctaacagaggaattgattcgacccgtccgttcactcgtcgagatctacgtggacgcagaggctcaagctatttggacaaaagcatatgagtactgattaactttacgaaaggataagaatagagaagcgaagattaagacaatgacaaactttgcgtcggagatctttcatcttagccgtcttaggatcccaactgtacaatttcgcaagagttgatatagtggcatgttcaaatcagccgacagacaggaagaagagaagaaacggacctgtcgaaagaacttcttagttcatccagttctcgtccgaaataccgcagaacagacgagtcttccatgattcctctcagaatccacggaatctcgtagctgtttcgttcttcgctagcaagaaactcgtcgacttccagagaaccagctgaaacggggcttgaggtagtctcaaacaagtatctgatggccaaccttcagaag

SEQ ID NO: 3180 - DNA, 12949 bp, Xanthophyllomyces dendrorhous
caaataggttgagtcttctccgtaagcagtggaatgaccaatccccgtcaagccttcatattgcacgcgaatcaaccccgaccagacataggagataagcagcagcatacatttgaaagtacttgacaaaagctagataactcaccggctgcaacggcctcgctaaggtgggtcactagcccaccgtcagatagtccagcattatgcagctggagacagaatgtcaaaagctttgtgacgaagtccgaagtacttagaaaaccatacacaaaatgtacaactagtcagaaagagaaaagaagagcctgcccgaattacaaattgagcagacgacttactcgtaagcgactgcatcaatatgtaaaaccctaaggatgtttggatgatgagcaactgagaagattgcagaatacaccgggacaactctaattgcgccggttgaatataacaatcatttgaaaagattcagacacaactcaagaaataccaagttttaggaagagagaaagactgactgatcgtttagagaagcaacgtaaacaagcttgcatccttggtccagaatattcgagagggactgaatatacgacttcgatgtcgcgctttcggtatcttggaatctgataaccagccaagttcgttagaaactagtattgcatccaaaacaagataatttgcaactgactcaaagagttgatgtgccgctgcattctcaaagtactgaagataaggtatcacaaccgagcttgagctcaggtatgccagtggccctagatggactccgcctaagcaatcgttatgaaaacagtatcaactatgcacagctgtttttcaaagaacaaatatcgtaaaccaaagttcaaacttacaaagccctagcatcaatacctttggcatttttctgttttgctgttcttccttcgccggtccaatctgccgcttgagctcttctacagccagttggttgaacgcagaacatatatgaccctgggcatagagcctctcgataaggtatgtggacaccggacaacctacaattgatggtcgacgatagagaacaacaagattatcgatgaatattcagagggcatagttaaaaactgttgctgaaacaagtcatcaaggtgatagagcgcaaatttcaagcataccttgagagtgagtagcgacaaggatagcatctgcgctacgaagatcatcaacccaatccggattcgatgtgtattccttgaacaatctatgcgataacagacataaggaaaccgattggttgaatgcagaaagatctttcaatacatgatcagtttaattgtagaatctttcgacagtggaatgacaggagaaacgaaccgatcaactcgatgttctaccttgccttctccttctagtggcatagctgtgatcttttctaaagtcccttctccgaagtacttttcgaccatgttgaccatctttttcgcaaatgtagctgacgtccctgttggctctccagcaatctatcaaatgcataccgttacattcaaatatatcaagaaaaatcctgatccaggttagtctgagatggaacaacctgtttgatagatggtgatatgaggaaggagaacatacgtatctaacaatagcattaggaaaccatccatggacacctataacaacaactcttttgacacattgaattcctaatgccttgcccttctcgtctcctcccttcaagcctttctgtacaacccacgttctgggtagtcctcttgattctggatcctccaaatattggctgtccagtccctctgtcgacgtacgctcccctttgttcgtatcaacatctcttgtcatattggtgcttcttggtccatagacatatgttgtaagagatgatattacgttctttgctatcgttctcttcttgactcgaccgttagtattcgaagtaggatcctgaacaggttgacttaaaaggggacgaggcggtgttgatcgaggcggatgatcaaatatatcggaaaatgtaggcagtacaaggtttggcggcggcagagagatgagcatggactgtcgacgcgatgtaggtacggaggagataggacgttcggaagacagatctccgggatgggcagtggtagtccctgcagtatcgattgacggacccgaagaaaaaatagaagaaggaagattgggacttgaaggagatagccgtaacttggtagccaacaggcttaaacttgatttctgtcgtatgttttgtggttcgcctaggatagattcaacgtgcctttttgagcttaataaagctaatgcctgcggtgtttcagccgttacaggaggtagtgtatcttcctttcctatgacatcaggaaccttctgcccatctaaaatagatgaagaggaagaagaaacaacaggctctttggctctgaattgagcgggtgtgagagtactaagccaagaggagtaagacacagaagtaggagcagcaagagaaacaggggtagtaccagtttgtagagttaggggaacagagagactcgtcgtaacgggaggcgcggagggtgtaggaggaagaatttcaggagcaggtatttcagagctcggatttaaggcgatgtctccagagggtatggctggcatcgatctgggcacaggtacaggtgtagcagcagatgatggccaaacccaagagatagggttgaggtatgaggacgttggaacgacaacagacgtcaacacatcaggtggtgctttaggaagacagttcgggatagaacgagatgattgctgatcagtcctagtaatctctccagggtactcaactacgagtacacagtgaacgacgggtagatgtttttaatcgattgcttgatcggtataatacatatcagcagggagatcaagatatcaacaactaacctgatggttgttcggtcataccttccggcagactgacttctcctctcgcaattacaggcgtacttctggttgggccatatcccaaataggaccaccattcagaatacctaacttcggatgcaggcaaagaaacatcttgcgaagaactgttttgatccacgtcctccggaactacagcttctgtggtcttgaaatctgaatcttttggtgattgaggtagatcagccgaagcctgagtatcgggaggaaggctgggctgatgcgctgtgtgatcagaatgaagatcagaagttgtccagacacagaaatcaagcacatacggaggttagggatgaatgtgaccacataccagatccatttttataggaccagatccatctcccctttgaagcgtttgcctcagttgttaacagaattggttcctcctcctggttggccttcacatttgtctcactaggaacactagtctcggcatcgcccgatgaattatcagcggactctccatagctcacagtgtcaatatggctaccatcgcccttcaaagaaacagatctcaaaatggcgggaatctgaagttggctcagacgggatgagtgaagccaagcacgactatttgctgtttcgggcgataattgttgaatggccaactgggttgaatcagtggtcggaacacattctgccgttgttagagaagcaccggatgagcttattcgggcagtaacagatgattgagaggaatttggttctgtcgaaggaacgagatgtgatgacgatgatgacgatgaagtcagtgaggcttttgggccggtcatatccgaacctttcgaggcagaaacaggatctgataatggaacattctgtgaggaggaaggccaaggaaaccagctgtgttgtctcgcaggcactgaggcggctttaggagaacatatcgtctgggtaggaccgacttctgatttggtttcctggctggcgtcgggagaagaagcaattgatggtgagaccaatatcggcgtgattgtcgatggtggtggtgcagatgttgagacgatggccaaagcttcatcttgatcttgtttagtcgagacttcttccagagggctctctatcaacctcctctttcctaagaagattccagcttcccctcctccttctcctccgaattctgaagtgatccaggtcctgtctctacctttgcccttgcgttttccattacctctagctcggtttctctcgagctcggcctgtttcgcttgaatagtattgttatccttttgaagggctgatctcatgaagaaagacgaggtttggtgatcttctgttgcaggaactattaatgacggtgacccacgaccagatgctgatgaagctgagaccgagatcaccgtcggtagggcaagggtgctcggggctggcaacgtcagacgaagggctcgggcggatgttgttcttatggaagagatagatgaacgggaagaagcttgacgctgtatatctggagaaggagaatttatggatgacatatgggaatatagatggtgtgtggcgtataaaggtggatgtggaaccgtctcggccaaaagataggatggctccgtagtatgtctaaaccggtattcttcggtcgcatctctctgtttacgtatgctttcacatatcagaaatacaacatcaatgtctggatgaatcattgtgatatactaaaataagatatcttctcaacacgataaagattgaagcagagaaagctccttggaatcgactctgtggaaaatgacctattccaatcttgagtccgcatgcggtaaaacataacaaatgataccctcttctcctcctaacaaacacacatctgaacaaacggttcaggaaacttgttcgattcaagactacacaatcctatttacacggtttcttgttcagctgatgttggagatttcaaaaaatcagtttcaaaaacgaagtagacaggattcgaacctgcgcgcccagagggcacttcctgtacttgctgatatagcagggaagcatcgtaaccacttgattactactcctttgatgtttgtcctgtctcaagcagccccagaatctcgctggcatctgtctctcgtcgaggacactgaccatacagtaaagccgacgggcgagaacggcaccctttcgttctggcgctcgttcccgaccgagtccccactggcttcccagaccccatatgcacaccacccaggtgtcatcgtacaatggactgatgtgatatgaccacggacaacagaccaaaggtaagagacccacctggcttgccaaaccatatgcgcaccaaccaggtgtcacagtgagatggatcgagaaagaagaagaaccgggaggagctagcaggtctggtgactgcacggagagaaatgcttggggtctggcgcaagatctgagggtgttgcctcgaagaaaaacatggcagatcacagctgaagccatctcaagacggccaaaatcccaacatgagtcagaattggtctcatttacgacattatgtcctttgtgatcaagtcatttgagcaaatgtcaaacaagatgtttaatcaggaggttggggacgagtgtgtttcagatgcatattatctttcccatctatcctctcctttcggccttcaactccttctcagccgccattcattcattcctgatcctactgtgagatattaccacctccaatgcgactgcttgacccactccatagggacttttcgcgtgtgaattttagttttggcgtgagggccctgttttcgaattttctcaagagctttggcatgatagacctcttgctgttggttacgaatagagattcagatcaagatgtcaattcgaaactctgaaagattggcattctgcatacagaaaccttgtgtgtggagcacgggcaccacgaaatgtgaaatacgtacacgttccgctacggtctggccctccgtcagtgtgaagtacattctggcggatttgtgatgcatctgtcagattttgaaatcatgtccaaatacaggaagcagattagctttctgttccagagatcccagtgaaagctacctcgaactgactactccaaatcgacctcgacccatgatcatgattcgcttgagatatttgcccttgccaaccgatacagcctctttaagtccctccaaaaacgtttcatttcagcacaaaacaagattataaatctcatgtacaagaagcagactcaagacgaacgaagcttcagttttcccggattcattccgagagcggttgcgtggtgcttgcctcgaatcaaggtcgatttcagtcgcagggcagccttcttctcagaatactgcagttgaagaatagccgaatcgacaggaagctttctgataagcctggccagcagtccaagctttcgaggagaaatcttgaaggccgctgtcgagaaagagaactaaacagtagaacaagaaattgagttcggatatcagcctttgataattgaccttcaagatgattaagtcggtatgaaatttccttggatggaggggcagactaaaggtttgacagttaacctcagcagcaagctggccaaagactaacgtacagttttgggaacctccgttcgctgctctcgcttaagctgctttttccaattcacaggcttagctcccatgctctgtccaaccgctctggcctgactctctttctgctctaactcgactgatcgcttgttttgcaaaatcttctcagcatcctgctcctgaccaagctcttgctctagcgagtcgaggagtccactagaagaggtcgatgctgggttttcctcttgaaatacagacttcacagatgaggaagttgaaggtgaggaaggtgccgatggattccagaacgcaggggccaaacgggtgactgatattggacgacgagaaagagaaagagcggtcctatagacaggagagacggtaggagagactgccaaacgacgaaagaggaaaggaaggctgccttgcatagtgtctgacgaggttgtgtatgagtcgatgaaaggtcgttgtcgattaactccaagggaaaaagaaagaagtggccataggcaagcgacacttagataatgaatgcgatgatctatatttcaagtattataaccctaacttttccctccccgacatcttgcatctcacagcggtttcttcagcatctctctttcattctaagagcctctgataccatcaccacaaccaggggaagtagagctaggatgattccgattcgaccctcagccgccttgctattcatactagctcctctgctttcattcgcggctcctacattcaaaaacacagccgttgtcaaaacgattgatctacaagggcccatcactacagaaacaactacctataccgcacagctcatccggcttgaccctggagagtcaacagcgaccgagttcgaggttattgtcggaaatgatgaacatatgcgagctggatggttcgaagctagagaaaaaaaggcaggaaagctgggagatgagctagcttggagaaaaggaggcaaaattgaagggtcatcgtcagtaatccttttcccctctttttatgatcgactggggcgtgtgttgcttcttctgacaggctactttttttgaccttcactgaccatgtatcactttcggatgatttctattgcttgaatagagctcacagctacattatcactctcccaatcccgttgcagattgattcatcgatcactcttaccaccaccttcgtgctgaccgattcggtcacgcccaaacccgctacgattgctcagaacgaggaccagtaccttctctggaagggcgatgccggaattttgagtgcttacgagatggagattggacgggttaagattaagtaagctattttggactcctttatcactgatagcataaacaggaatataacccatcaacagggaatcaaaactctcaagaacgataattgaactgttcaacctctcccacagatcacctactcctcagattttgtcttactctgagcctccgacagcgtacacacagtcgaatccgatcacaaagtctggtgcggtgctcacacttggaccgtatcactctgtgccagctctcacctcgactttgagtgttgctccattcgaggttcactatcgattcaatgatcctgtgatcagcgttaaggagctcaagagagctgttgaggtaggttggcaggttgtatccgagtgtagtcattgcggaggggaaagtaacttatattcgtgactctgtctcatcaggtcagtcattggggaaataatttgaacatcgaagataagatcactctatcgaataccggaccaaagtcagtctatcattgtcgctgcgcatgtctagtctgattctttccgctggacttccccattgaaattctttctcgtctcctccaaacagtcttaagggacacttttcccgtatagactatatgcgatctaaatctcagcggaagttccccgctcaggtgctttccgatctgacgatgcggctacctccgaagatccaggtaccgtacgtatacgacaccatcggtaatgtctcaaccactcatttcagacattcagtttcctccgagagatatgcgaccaagatccgggctgcgtcccgactgccagtgcctcacgagaaggaggaaagtgtgttggagatgcggccgagatatccgatcatgggcggttgggactacaactttaccattggatgggaccagagtttgagcgagagtctcagaaagacggttgatgggcagtgggtgcttggggttggattcctgactgcgttgcagggtgttcagtatgaatcgatccagtgggatgtcattctgcccgaaggggctcggtgggtccttgtttgacgtttgcttctatttatcagcttgttcgataactgacatgttctatcgtttaatacttcgcgtgtaacatctagggatatctcggttgaactccctttcccgaccgatacagctcccgagaagtacacgcatacgacttatcttgataccctcggccggccggccgtgagggtcatcaaggagagatgcactgagcaatgtgctgtacctgtctatgtgagtgacgcattttttgattgacctgtacacgtataaatgattgacggtatcttttatcgcttgtcatctcgctcgccaccgcaacgaaggtcaagtacactctgcctgttcaggccaaccttcagaagcctttggccgtgacggtggctgcgttgtcgttctttgtaggtgcaatggcactcaagcgggctttaccaagtgatagacacaggggtggcgtggcaattaaggaagtcaagaagcagtgaactatcgatagaatgtttcaaggcggggatcggtcgggtgatagagatcgcgggaagaataatgttatgtctttcttttctcatctcttcctctattatgaggagatgaaggaatcaaatgccagatttcgatgaagaaacaaagaaacaaggaagcaggatttgcctctcgtgtattgaagagttggctcaatttggccgcggaggagagcatttagcgggatggattggcagcaataggctggactagacttcgatcacatttcactccttttgtccttctttttcatccgtgaggttttcacttcttccccaagatctttcacgaaagaactttccaagcggaatatgaaagaggagagaaaacccaagaaaaaaaaccaagggagaaaagagcaaagaaacacgtggattgtatgatacgcatgaaaagcgggcgtttatttattctcgcgactgccaatgtttctatcgagcgccatttgtttatctcaaaagatgcctattcggtcaaatctttaacccaagcgatcaacaaagaagggcgccaaatttcaacatttttctggaacatcgatgcggcctcgcgctgttttacggggaaatcttttgaccattaactgatcgccctttgacattcctcttgcttcaagggcctatttcacctgatcgttctttagaccctgtcctagtcgtttgcctgttcatctgctcacatccaagagcatttgccctggtttctatctggccagaattgctcgcttgaccctcggttctgatttgttctatacaccctgtccctttttctcccttttctctatctttctcctttccttttgtcgctgctctgatcgggtccttttttctattctgcgtccgccttctcttgcctctctaccctcactctcacttccccctgtcaattcatttatttgcttacaactggctaaccaaaatctatgatgagcgggccgaacaagaaattgactattttcagcccgggctatcttctcaattccatataaagctaacccatcgtcagaatcactgatggcgacaacctcgcatgaacccctgcatttcttccctccttccctcccgacctctgaaaattactacttgtgcacagtcttttcatttctttaattgtcgtctctaaaggcctaccgtccgattcatccttgttcatatctgactggttgattcattccatcagtacacatacacatacacacgaatgtcttcctttcttgcattgtctcctcatttaagctcttcatcgacaccctcgacctccgccacagtctatgggcagtaccttcagcctagcctgttttcgccaggagagcatgtatcgatgtccagagtcaaccaggcctgcacgccctgtcgcacaaggtaagtatcttccgctcgccgggcaatgtgtgttatctgggttctcaccttggcgttgtcattctctcccgtactctttttccaggaaggtcaagtgctccggaagcataaataacgggcgttgtacaaggtgtgagaccgcaggaaagggcgactgtagtgagtcctgaggcttgttgtttctgctctcttctccgagaacaatctttttaagactgaacattccttgacactccttcttgcatcagtattcgaggccgtaccgtttgaagtaaaggtggctactcgggaacgaaaagcaaaaagaagggcaaacgtggccaagtcttcaactccttcgtatgtatgctctcgcccggattctccgatagagacctctacaatgtcgattcgacgtcggagagatcgagcggatgttgctctaccaatatcgcctcgacttcatttgtatgacaactcgttcacattctgtgtatgtcctctttccgagtttcttcagattgtagggctgttcgtcctcgggatcactcacttttgtgtgatccgaaccttcttttctctctctgtcttttgtttcgggaaagaagtcttcgacgcgccagtcttacgagaaatcaaaccaacgaagaagaagaggtgcgctctgttcggctacggtgttccaggacgatcaaactcacgccagcgtgcccaataccggattagtctacccgatattcgaatctccgtattactctcttatcgattcgacctggacctcgaatgttaggtcgacaacatatcccactccgacatctgaacaaatgtacgggctcggcctccatgctggacgcgaagcgtatccgatcgaggtcaccggtctagcgactactcttcctcatggtcagtcgatgacaacgactgctgctgccgccagtggacaatactacgctcaaccgacatcaactcaaacccaagtgccggacggttacttttcgatacctatcggccatgctcatcgatcaacagggatgaatgagcacgaaaacagactagcggtccctacagaaatatcgaaactctctcatcatctcttaccggctctgtcattagaggatcaatccggtgagggagagacaccgggcccaccgttgacgccacaaggtgaaacccgattagttcacgaggctacgaatggcagaataaaggcttgggtcgaatccgggctttaccgtgactcgatagcttcaggggaggacgatcaggttgagtggtcgaatgcttggtgtttatagaggaaaatgtccatcaagccttcctcatgttcactctttgcatttccgttactcttttgaaccaatccttgtatacatactccttaaattaatcaactatagaaaagaactctcagacgactgaacaagactctatgaaggtttctcctttccttttgattctctttatctcttgtgaatgtattgtagatcttccaatggataaatgatcccggcctgatatacggcttgaacccatgtgacaggctcgcttagtggttaaccgaaccgtcatcagtccaacaggtgcacggggtgaagatgaagaaaaggtggagagagaagaaaatcttctcggtattcaatttgtacgatcgactgtgcctgctatatttgacgccatgagatttgtttatccaggggaagagaaggaactatggagtaacgaatcgcgagaagggctggcgtggcgcactcagctcaagtttcaccaattcaggccccgttctctttgttcacgaccctgtgatggaaagagaagcataatcgataatttttttacgattgaaagaacctttcgggatcgggacgaaagaaaaagtagagcaaaagaggtgtctgtttgagcacaagacagtcatgagatagatggacgaagcgaataagaggaacaaaggaagagatgattagaataatttagagcaaaagacgaagtagacaggattcgaacctgcgcgcccagagggcacttcctggacttgctgatatagcagggaagcatcgtaaccacttgattactactccttcgatgaaataacaccttctgtgacaaatgatatgtgttgcaacattctttcggacaggactgttggagtttcagcagtcttgacataatttcatctgttatttgtaatctcttcttgagacatcatctgcctgcctctatttgcgcggagtcccaaggctctctttccgaagagctgaaaaattttctagcgggtttcccttctgttttcctggtttc

SEQ ID NO: 3181 - DNA, 15111 bp, Xanthophyllomyces dendrorhous
ttctgttttcctggtttcccaatccattttaatgaaacacctgggtggtgtgtatatggtttgggaaaccagtgaggacttgattgggaacaagtgccagaacgaaaagtccattttcacccttttatttcagtaatattcttctttcttgaattgagagtaacacaaagcgttatgactgtttttacctcagtctcgtccatcgaaggagtagtaatcaagtggttacgatgcttccctgctatatcagcaagtccaggaagtgccctctgggcgcgcaggttcgaatcctgtctacttcgttttctttttgtctgattcacttttatttactcgattctacatcgcctgttgacgcaataaatcgttctcacatgactatcgagagatatgaagaacataagagacacaggttgctcgtaatacataaacgtccatcttgcactatagatagccgctgcgaaagaggtattaagactagatgatggatttgctagggaattaatcattgatttgtatgcaaaattaacgcacataagtaaggcagagaggaagcatactagcaatctgaggcaacgaaaggctttcacatatgaatgatggtagaatgcaaaagaaaaacatggcattaagccatcttgattcggtttaagaagatacaagctaaaaaaaatcagaatcgccatgcagaacgagaagcccatcgtgagtggacatgagataatttgtcagaaagcagctatcgttatggatcctatatttggactaaaagggaaaaataagcaagaaagacagaaagattgagtgcagatccatatacgatatcaccttttaagggttgacgaaggtctggatagaggtcgcgtctcagttgaggtcttgtaaaatcctcaattactcgtctggcctgtgctcttataactgctctgcaggaatcgaatcagtcggttgcctgctcatcttgaggagagctagctctcgagccaatcgagcgttctctgcgcgaaggatcatccgattgccttcggctgattcaatcacctgttttattgtcgcaaacaacgagtatcgtcggccagttactttcttcagttgcttatccggcaaaacactaagaggttaagaagacgatacaagaaaagaaatctcgggaaaatacctcaagcgcccatccagccatttcgtaccatcgttctcgctgatcttcggcagcccgtcgcatctgtctcagcttcacctccaccttctttctcttttctctctctgctgagcagctctccttccaggcctcaattggcgtttcccattcgttctctttgtttgcatcccatgaagctggaaacgatgccgttgaagaggtcgttgccggtctggaagacggagagccaacaccactgaaggccgatcctgtcttccctctagatccgacaagagacgcagatgcggtcatcatatcctcttgccttgatagcgagaaggagaacgaagcaactgtcgttgcgtccgactgacgatcaggcgttgacagagacggagagtcatcagtggtctgtgttgaacagctcgaattaggagagagatcagattccctcgcagatttatttccgagtggcgtcgtttgaggttccagatctggtttttcgaagttgtgtccagagacagaagagcttttgcccagctgacctccgtcctcttccgctctatcggcggagtgaagccatctcgggggtgtggaaataggatgaggcccaaaaggaaaagaggcttgacaggcaacgtctttacaagagatttcttgcctttcaatagcatgctgatcctcctcactgtcctcggctccttgatcgagtagactgatggtcaacgcccgttgagcaagcaaggcatctcgagcatcgtcaatggttgacgtagtaccaattaaagtaaacctccgcgttcgtccggaccggaagccctccgcaccaaactcttcttgagctcgtccggagcgagaccgagcacgagacgattcccacatggccgagtcggcatgtctttgtagctgagcggcagtcaatcttcctgagggcgccaataccgacgaagggatagaaggaagccgatctcttttgacggaagagacgttacttataaatgtagtttgtttggctatgcccttcggttgtggcaaatcagtggagacaatgggtccaagtatagggatatttgaagggctcgggtgactttcctcatccgtttcatagcttgagcgggttgaaggaacgtaaggcttagagtcaggcacatcagaggataattctgtcgacatgtgtctatggttcgaaggaggtagatgagggagtggggttgtgggtgctgggcagaggtttccaaagtctagtgtggaggaacgacggaggctaacagtaggagctgtagatgggcgttgactgcgcgatttgtgaggataagatatgatgttcacggtatttctagtgcagagaatagagcaatttgtgaatcagagtgaagagcgcacatacacataccaaacctaagagaagggagagactcacccgctagcagtaacaattttttgtacccctctgacgcttggctggatgctgtccatagagggtacgggtggcaattcggaggaagtggatagttgtccgaacccactattgccctcgtttgacgaaaatatacttcccagttttcgtccaagcgtcaagacgcttcgtctgcgagagataggattgttcttggaagaagcgcttggaccttttacaggcgcagtcgaaatttcttcttctggtcctgtcgatcgaagaaaatccgccagagtctaagtggagcgaggatgacgaatgagataggcacggaaatacatagttgacgcaagatcaggagaacgctcacctgagtcctcgtcgattgagtcctggctgatttgtcgaatacgacctgtttatctttagagccgtgtgaagaaaaactgtgaatggatgtctgcctgttgatcgtcgacttggcctcaagcctgccttcagtcaccgatcggacgtggctgtcaacagatctgactggaatatcgttatcaagaaaataattctggtaggtctgtccactggtatcgaagggatctatatcaaaaaacatagaagtcagaggagcaggtgtggtcttgtttggcatgtttttcgtgagtgtgggtgtggtgggaagagaagagaaaaagaagaagaagaaagaccgagagacgacaggcaaccggaggaggacggagcagaactttcaggattgatggacgaacatgtgagttgacaggggaaaaaaggcacgcgagaaaagatctgcagcatgttccaggtggaggttgaagctcacgttctatcagggcgagacagggcaataccaagtgagacaaggcaatatagggcaagacagctcaatgcccaggaaccatccgagcagaataacatcaaggcgagaatgtctagagcgttccagacttggtctgttcctgaattgatctaatatcagctgcatggttagctttcggactcaagatgcaaacggggaagaaagaacgtcagaggcatggtcagcgtcaattctttgacacaagatggtcgttgaaactagctttagttgtcagatgagacgagaggattcatatgattatataatcggtcgtccaaacttctaccgccgagactcaccgcttcccattacgagaatatctaactggaccaactgacttgcgattctgggcatgttctcctctcgtgacattggcactaacacacttggctaactgcctcgctgacagaagccacgcagctcacgcattgtataaggttgttagaaaattcttgttgacctctcttttagatccttggggtgaagagaattccctgaaattggaccatccgcgtgtgtgtatatgtgcctgaagacgtcctgtgtgaatgtcctgtgacgagtgtctgactgcccaacaaatgaactgttcctccgaattcgtttcatatccttcttcttctttctcttcctccctccgtcgccttcgtcgtctttctctcttccgcattctcgactgtattcatatcgttctctcttctctatctatctcccctgatcctatccttcccttccagctgtactcgatcttctttcttcccgaccctggcaaacctttgatctcacaacccaaactatttaaatgctccctcacgatgcaagttttaagggcagtaaaacgttatctgtttacctcgatgacgctgaccgaacgcgtgtaccgttagctgccgggccgaactttctatcaatgcccgaccttgagaagctcagcaggagcctcaaagcgcctccagagtttccagttcgtgcaatttctctgtgacgtagattgttcagcgttatgtgttgatcctttactattgggaacatgaattatagcaaaacggacgcaccccatcccaggccaaaattgctagtctagaatcgcagttattgacacttcagacaacggtttgtgatacctcgtgccgtttattatcactgtgaacttgctaacaccaaagaatttgaaaacagctctcagaatctctcaatgagatgtccaaacactgtgaagagaattttaatttaacggaaagggtatgcgagctagaacaggcactctatgacatgtccgccgccgaacgagaatgcaacaggcgcaagaattggctagaggacgaggtgagttgcctgtatatctcttcgtatatcttgcgtgcactgatcgcgctcaaacatcactcttaaatgtcactgcttgacttgtccttctagcttaatcgccttcgagcacattcaccgttgtttgtgccgacagaaacgacgcgtggtctatcaaccatgtctgctggcgtctctcgcgcgatgcattcctgcaagagcacaaaacgatctgactacacacttgatccggcaggaggctctgtcaagaccttagcctgtgctatagtaggtgactgttttgtctctgtaaaccctgaatccttcgcaccgagattgaatagtctaaactctcgtcctgaatggtatggtcttcagccatcgcgcatgcaatcaactcccagtccatccccgaacatcactctacggacaccagcccgaatcagtcgatctcgagcattgcccaacacaactgccaataacaactctcttcagtgtatccccagtccaaacactcgaatccctgttctttcagcctcctatgaaagtcgaatcaatccccgtcctgcgtcccaaccgctagcctctccactacacataggttcttcccatgcttcgtctcagacaattatttctatttcacggtctcgttcgacaggagacgttccctctccgtcaatcttgaaatcgaaaactcactgctctcctcaaccggtcaggactagccgatcatcccatgtcttatcgtcagagtcgtttggagtgttcgactcaaaacgaggagtgatctacggcaatgaactctttacctctcccatcagaaggtctgataaaaaagggcatgacgacgtctgggaagagggagctagcgcatggaacaccttggctggttctcgacctgactggacagggtttgacagctcaccggaaggcgtcgtcaatacggacaagctcttgaagcatatgtatacacctccgacaatgaccgcagaggatgaacgctcatgttttctcgccgaatccaacaaggaaaactactttggacgctcaccactgaagactcctcatctcttgacccaacgcccgtcagtttcaaaagctggttcgaaattctcaactcgtatacctgcatctacgagcttccgatcgaaatttacacgaacagctccttctttcgaccagcttgagcttgggtttgaatcctctgatcgattcgactctcagagaacactagtcgaccttgatctatcctctgcctccacacgtacacgcgtactctcacccgcatcgcctactgaacagccctctacccgcacaggactcgatggctccagaagttctttagatcgaaagccaccattctcatcgtctcatctcagttttcatgagcgaaacccccgttcgattcagaatgcacaatcgacgaataggtcattgaagaaggtgataccaactcggtacgaagcagggagctctaggacaactaggatcactcgaactgggtacgcaactggaggttgagtttcttttttttcgctatgattgtgttatccctatagattgtattagtgctgccttttataccatacttaagcgtcataattcattgacgacatatctaaaccacaaatttttgtggatcctgttctttaaaccttggatacccgagctctccattctgtcgttgtacgatgtacactgtatgattttcttctcatttctctgccctattctcatttgtttttcctcgatgctggtctgtattctttctttaaatgatcgtcatctctccttattgtcaacctcacgcacacgacttgttcgattagtatgtattacaccttaatttttttgctcgaacctcctctcttctattgtcgcttcttgtcatgaagctttcgatacatctactcctctgacttatttcctcaaaaaaaaaactcagaaatgacgagagataaaaataaaacaacatggcgtatacaacgaaactccggttcttaaatcctaaacctgatctttgggggaagaaacaaaaacttgtccgccctcttcttgacctttctccttctacaggcgacgaagataaaataacaacaacaccgatcgactttctgagtgcaataatgggaaggaatgaggaagtggagaaagagtcgaaatctaaccctccgagggtttgaagtacacgttcgttcgttcatgtactggaggtaaagtagcccctggcaattccttcttcaaaccgtcctgtttagatagattcaaccaagattgattttgaaggcaggatgatcaagggttgaaaaatttcccgagagtacaaccggtagagaatttgattttgacacagaatgcgggatgtaaccaatggccaataccagaggagtgttgatcgatcgaacaatcaaagtcagacacaatatagattgtcagtaatggttctttttggtatgatataagaatgacgagcctctccacaaatatacagagtgaagaattgaacacatacgatcttttcaaacacacacgcatttagcggtcgctctcgatttcggcaagcataaaagtcctgattgagatgcccgttgacaatgtcagatgggttaagttcagatgaagtttaccaagcgacaaacctggttgttcctctccaagcattgccagtgagcctcgtacaactgagcacaattctctctcatcttgttgatactgttttcagaagaccgaagggtgggaaggcttagtttacgtcttcgttatccagcggccttgactactgctcggcagtcgagactgagagagaagggacaaacaagtcggtagcacaccgtgtcacccgccgaccctccgccaagcagtaagcaggatcttgattctctgccttgcaaagcataaagtcctctacaagaatcgcatcccgagggttaagcgtacgtgaggaatcagaataaatatcgtatcacgagtattaaaagaatttagacctgatcagcttatcaagttcggctcaacaccgcatgaggtttgagcggatatagtcggaagatgagatggcgaaccagtatagtctttgcaataaggagcgaggaagaatgaggcactcttcaaaggtgcactcgtcactccaagttcagtaaccttaaggatgtttgatgggagtggattaggctcgacgacatctctgttgatcgatgggcgatcaaaatgaaggagaaaagaggcagaataggtgaatcccgatagagaaagagtacataaacagacaagaatgtcaggatcttgctctcctatcaacgatcactcgaaaatatcaacagcaatcaaaagaaaacatacgagtacaatgagttgtattggtttcctctaaacttatggtcttgacccatctctggatgatgtattcgatgggaatgtcacaacggaaggaatgaatagaatggaagagatgggagagaataaacgaagaaggaggggacccaatctaactagtggttacgattttagaaagtaaccgcaacgtaatccttttggcttgggtgccctcagaccagaaaccacccggaccccaccggtcacgtgtttagtctgtgcctgccccagcctcatcctcaacagtcatggcagtttcagcagcagtggcaaacatcagcagcaccgatcagtgctcatcccggacgcttgtcctcgtcactccgacttctttttgtcttgcaggctgccgagatggatgtctgcttctttgcaagggattccttctggtcggtttgactggctgtcggtcatgatgaacagcgcggtgaaggctctgcagtccacagaccacagaccaagacgtgaacagacaaagatatgaacagacagagatgatgtgtttgatcgggtcatgtgcagctaaactcagtgtttatcagtacccgcgatgacatacctgatcatatgtttggtacatcatctgtcgacgctttcatcattcttctagctatacgcaaagtacgatattcctttttctaatttgaaaatactcctcctatatatacactgggggacatcatgttgaaaatagttcacaaaatctactgtgccaaggatatagaggaacagagatggcgagtttgatgaatgcactttccatgggagtttgacaagaagaactcactagatggtcatctcgaggcaaagaagggatatcagatatataggttgagaacccagtgaaccatagagtaagaatgggcagaaaaatggggaaggcacttctgcctattacatgatagttcaatcggtccgaatagactcatctcgataattcttattgttattgcccaaaaatttccttgttggtcagatggtcagaggtgatatgatcagaacattttaaagaatcactgaaacacgccaagtcagaatactatatcgatcagacactaaagacactgaatcttgttcattcgcgcaagactcgcaagatatcttctcaccttcaagtcgactcccaagatacgttcttatgtggcgaagccacctttggcatctctcctggcgcgacatcatgataccttctcaatatggttgcttcggacgagagatgctgcttatacgctatcctcagtgacctcggaaagttgacgagtaccgtatcctccacggtcggttcaccaagataatcaaacaacacgtcccgaatgttcgtcagcgatcgtccatttcctacttctggaaaatgaagtctcagcgtgaccctgcccagtaaccggttgaccatactgagtttgttctcatggtgaaagaaatcaagacaaccctcccggagttgagtttcgagaatgacgcggttgatgttttcaaaacttcttcctagctcattcagctttgctggatgaacaagagcgagagaagccccaacggcgttaaacatggcctgttggacttccaataaagctggctcaaacgcatccagcggaagacaggcgattgtctttcgaaaaggagcggtgtgcacgtcggtatattgttgaatatttgccttgaggtcttgaacagcctgttcgatttcgctcggcgtaggagggacatagacgattcgttccacgctatcaagtgatggaaatttgaacggcaggaggtcgttcatgtcggcattctgagtaggtccctctgtggaatcgagaaccaatggaaatgggataatggtgaacacaagttccttcacccatccgattcgagtgggtcctaagattggatggttcaagcatccggtctgtctgtgaaagatccctgtccaatgattaggccgacaaataacgagtcgtctgtacaataagggaaggcaatattgataatatgccttgcagacgcgcaaaaggggtagagcagatgataggaggaatggattgacgtcctgtgggcttgatggcaggtcttgcttgaatgcgaagaagagaatgatgaattggatctcgacaggaagattgggtagcaccatggaccgattgattcacttgatttctagagagtaagacctagcaagaagatcaaagagtgtggttgatccctaattaatattgggatagaatcagtatattcgggtcaaggaatttaggcttgaaggccaactgagagagaagaagaaaccagtgttagtacttatctggcagcatgtttttcattgtattccgtaatcagccgattgaaacccactcacactgatgtgaaattgactcggaaagtttatatagagcgtagcggtcctcaaggtggcacgaagtgatagtttcgaacgagaagaatttggcgagatacacgaagactcaaattctagggttggtcatcataaaactgaaaagcttatctaatcgtttacttgaaatatggctttaacccaaacacaagcgcagaaaagacatagcatacaatatattttgaaagacaacgaagggtgttcttgttgtgtaggtatcaagaggcaggagaggaaaaacagaaatcgaatgagaagtgcaacaggaaacttctagatgatcgaggtagatgcaaggcaagtggaactatgaaaaaggaaaataatgtgaatgaaaagggtacaaattcagacatgggcaaagcgtccaaacacgtcgataagaattggggggaactgcatgaagcacgttgagaagacagtaggtgaatgcagagaaagaggaggacaaggaagacaaaaacgagagaatagagtcttagatgaccaagccggccaaagattgactgatttcaacctcttcgactttgacggcaccttcctccagatccttggcctcatcctttctcttcagctccgcttctcgagccttcttctcgaactgtttcttcatcttgaaataactgtgaagtcaagaacgcatgatgagtaaggtatggataatatgagaacaggataaaaataagagcaagatatactctttatgtaatccacattcggtcttggccttctggccagcccatcgaccggatcgctcccccgcttccgggttggaagacggagtggcggtggagtgccaatccccaatagatttgtagccttgatctagaagaaagttgtagggaacatttctgagacgcagagattgcacgatatgatatgtcaacacagaacaagcatatgatccagaaagcaagaaagaacagcgaaggtgtacatactcggcatcaatgtattcttttacccgtccgaatgaccactcgatcaacgggttgatcttgagtaaacctgtcgagtcaatctcgactacaggaagagcagctcgctcagcgccttgcgatcgtcttcgtccagtcaagacggccttgacgcctagctgggcgtatgcacgatgagagggttccacctacgctcatagaaaagatttcaaggatggtcaggtttacacatcgacgacacgatgggacggatgccagaacataaagaaacataccttgacaaggtagtcatacatgtcctcttctctctcccaaagcttttctccataaacctgctcaaatgccttcgcatcttccacctcgtttccctcctggtccaccggcttgaacacgtgaagcggggccaaatacgtctcttctacttgactagcaagcgcaagtgtggacgggaaatggtagagtgtgtcaaggaagataagagggacgaggtgaggctcgtctcgtgagagcgaaatggaagaaatcattgaagtggctgcgagaccagttctagagtacggttaaatggaaaggtgattagcaaccaacgtctgatctggatttatgaaaaaaaaaaaaaggagaaaacccccgacgatgacgtacaatccgaaagcagtagtttgccagagtgctccttcaggtatattgtcaattgcccactcgagaatctgttgaggagactttccagcgagctgctcgttgatctgaacgagttcatctgaggtgaacagggtggatgcagctacgggcgaaggctgctcagcctggggagtggtagaaatgctcatggttgattctggggtgagaatggacgatacagctttggatgcagacgatgttctgtttcgagcgagcgtcgaaggtgattaggcggaggtgactgtctagaagaaggataacgagaatgtacagttacgagcaagaaaagaggggaaaaaaaagaaagaatgcttgagcgaaagatttatatgtcgcttatgggtgcacaagaaaatgagaaggatcacgcaattgttaaaagcgtaggtcgctccgaaccggcaggcggttccaatatgaattttgccggttgaatgtgtcagccgaaataatcggtaagccgtgtgtgagtgatgtaactgagttgctgacgaatgtaactgaagacccgagacttgtaaaccaacgcctagaacattcttgttacgctcacgcgagaccctcgatcaaacaggtggccatgactcatcgctagttgtaaccgcacgtaaatcgtgcctctaggctaagcaagtgatagatatgtgcgtggtctcacgggttacaacccttcttgcttgcacacgcgcaactctgtcttctgggtctttctcctttttcctcctttggtcttttttctttctctttccatacccaacaaaccttcttcgtaactttctcatacaattccccaaaggttcgttcttgtgttttctctattggcccttcccttcttcagcccttttctcgtcatgtcagtattctcggattttcgcttcatcctttgtcttgccatccttgactgtttatgtgagatgggaaaacatgatcatcacgaggtggagtgtagggtgaggtggaagtaaaatcccatcgcgtgttttttctcctcttccccttccttttcgcagagtcatgcttctactcaagcagtaggaacaccatcaagaacgatctctcctcttccctcttctcaacgccattttcttctatctctcctgtcctttctcttggatctttgatctccttgtgtctgtgccaatagaaaagaaaaggggtcaattgaacttacctgtcgtcttctttctgtcttccaccttggtttcatctcccattcatctattccatcattgcccttcctgtccatttgtcctcctctgatttccttgttatcgtctatcgcctttttgtcacagctaaatttccttgccccaactcgcaatatctaccagatatccattgtaagcttttcttgttgtcatattccatctctatctcttgctcgagctcttcgtatatcaccgaatgtgcccaagcggatgctccaaactctcagaacggacgaaggtggggtgaaataaggctgaatgtgccaaatttcgggcagagcacatcagaacaaataaagaaagtttctgataggaggggcggcaggagcaaacaggaacgatgtgcggatgcacctgtcactgccgagcaggggcatttcttctcggtttgtggcggaagatgctcctagatcgtctccccactcacacgtacactcctgtttctgtaaatgtcccgcttactgaattacgatccttttaaccgttaaaacagatgtccgagtcgagagaatccaacgtctaccttgccaagctcgctgagcaggccgagcgatacgagggtgcgtttctatcgatgacaacagaaatacaggtgtatgcgtactgacatctcatcattgttttcaatgatgacatcgtgtgcattcatctgtcaatccgacatctactcttactggaaatgggccatctgtcttgtatgggttgaatattatagagatggtcgagaacatgaagcgagttgcttccaccgatcaggagctcaccgttgaggagcgaaatctcctctctgttgccttcaagaatgtcgtacgtacctctcgttacagatttagtgtcgatgccttttgctgaatcagaccatgatctacttttgcatacaatcaagatcggagcccgacgagcctcgtggaggattgtcagctctattgagcagaaagaggagtctaagggaaatgatgctcaggttaccatgatcaagggatacagggagaagatcgaggccgagcttgccaagatctgcgaagacattcttgaggtttgtgactttccagattactccgcccttcgaacagcattgcatgaactgacgataatgggaatcaaattgtatattgcaggttcttgataagcacctcattccttctgctgcctctggagaatctaaggtgttctaccacaagatgttcgtcctttctggtacctaaaaaaaccgaagctagacacgtgctgaagagttatctggttgcctttgaaaaaaaatcaggatgggagactaccaccgataccttgctgaatttgcgtccggcgacaagcgaaaggactcggctgacaagtcgctggaggcttacaaggctgcttccgatgtcgctgttactgagctcgcccccacccacccgattcgattgggtcttgctctcaacttttcggtgttctactacgagattcttaactctcgttagtcttctctgaaccacttttatccgtatatatatcgactgttgctaagaacatttgatttatccacagccgatcgagcttgccatcttgctaagcaggctttcgacgacgccatcgctgagcttgatactctttccgaggagagctacaaggattcgacgttgatcatgcagctccttcgggataacttgaccctctggacctcggatatgcaggagaacgaggccaagggagagcccaccaaggaggagaccgctgctccggcagacgaagagtagaggctacaaggacgtttctttttcctttcgcctttccgagtttgttccctggtctttgttccgtatagttctctctactctggcctatctcattt

SEQ ID NO: 3182 - DNA, 10696 bp, Xanthophyllomyces dendrorhous
ctctggcctatctcattttcctcaattacctgtttcgttctcgcccttgctatcctcgccatccttctctttacctttctacttcatgatatcttggatgtgcgcctctagtgtttgatgttttttttcttcctttcgtcttcgattaatcgttttcgctctatctccttttcctcctttcttcctcttgattcgattgttttctctttcgcgaccgctctcgactcttcggtgcatgcctcctttttcaaattcgcaatttgattcggaactatcgaagatggtgaatgttatccaaacaagcaaataatctgtgtgttcaaatattcctcctgcggaatcgttttcttttgtatcccagttggttgtaatccccggggggtaattgtatgtatggggatcgatagaaagccgtggacggaagtcgaaatgatttagttcagctccgcattatatccgcgccacccatgatcttggaaagaaaaaaatggggaaaaaatcttgttccctttttccttcttcttcgccacgattcttccgtctcagttgaaaattctctcaagaagactctttttttcgttgtcgttcttcctcatcaaccactttaggtttttcttcctcacaaggacactatcatctaaagaaacaactacaagtcaagaaggttatcctgtctctctcctctgtggcttttagaatagtatattgaccagtatccgtttcttcgattattctcctccatcgatcgtattcatttactcgacgcaggcaaagaatcaaaagtttgttggttaggtttgtcgaagaactcatttccctctatttgtccaacatttcatctcgcagcaggcttgcgtgctctcctttttgtctttgaagagaaatgagacaggaaaacagcaattgcctatttccgtctaggtcggcggactgcctattattccgctctactattctgttttcttccatcttctctttctttgtgtctgcctgtttttaaaaaatataccaaaaaggcaatagagaaaccccagcgatgtacttaccacccgctgccaaagcgggagaagagaagctgaacgcactgggtgcaacacgggtgccgggaatctaatcaaaaaaagagacctgtgctgagataataccgtcatagcggatcatggataatgcctgcgtcgcgatcaattgttgccttttgaacccactttctcctgccttttttgctctttcttcaccttttctctcggtatactcatttttcgtgttggtgtatatgttggattgggctggtcgtcgcgatgctggttgtgcaaacagcaatgcatacacctgactggaaaaagatgtgagtttcttatgtttcttatgaccaggcagatggtcgattgtgatatctaaggaaagacgaggggttgtttgtttcacaaggcttggttttccttacgtgttccctttcgattctttttttttgttctatgtttctctgtttgcccgcatttcgttctgtctgcctgtccgttgtctatgaccggtttggtttttcagtcccaatgcgtccgaccacctgaagtggtacgagaataagggaaagctcaagctcgacttgtacgttaaccttttgaagcttcaaatgcagccctggacgactgacctcgttttgagaaaacatcctacgttttattttcacagtttcttgagtatcatctttgtgggcatggtcctgaacggatgtcagtagctactccaggactttcttttcattcttttttgtccctgtggtttaactcgtagtgctcgtaccgtgtgtagttgatgggacgatcatctccaggattttagcgctcgatgtttggacagaggatattgggaacccgagcgcttcccagatcggagtcctcaatgctgttccatacatgtctggttttgttgtcggtcctttcatcacttggcttgactcccgatacggacgacgatggggacttcgatgtcagttcttcttctttgtacgctcggctttagactggatttgggttcttggacttattttgatcccgaatcatgcgctatcatcagtctatgggtacactatgatcatcggaactgtcattggttgtgtcgccgggttggacggagtgaatggttacggtcgtacgtcgccttgtgctaactcccacgatatctggccgaagcttattctggttcttgtgactgctgctctcctctcgcttagtcttcgtcacctcaagattcatcattgggtttggtatgtcgttactctatgtctcttgttgacgcatatagtctcattgtcttttcataacttcactacaggactggcctcttttttgatgacttccctcatcgtcgtgcaggagatttcacaccctcgatctcgttcgattgtggctgcctcttgggattcgtactggattttgggttcagtcattgcatctttcttgatctttggaacatcgtacatccaaaactcgtgggcttggcgaatcccttacctggttcagcttccgatggccttttacgtatgtcctcatttcttctcgagatataactgtatcaatcggaatttagctacttctctctacttacgtcgacaactctctcagattgtgattggagttcaatttgttcctgagacgcctagattcttgatggccaaaggtcgagaggacgaagcattcaagttttttgttgattaccacggaaacggaaacccaaacgacgagctggtcttatatgagtttgatcttttgaagaagacgcttcagatggaggcagagaacaaggaggcagattggtcgatgatcatcaagaacaaaggtagtctacatcggttgtcgttggcagctctcatggcttttatgaccggggtaggtctcttctttctgtgtgctgaaagctcttgttggaaatctgacatgtttgtttctcacgttgatctccagctgtctggatgtaagtcgggatgtgttgatttcgatcacgtggttgagagtacgctgactataacgctttccatcgacaaacagcttccatcgtctactactactgttcgttacgttctttagtccagttgataatcccaagaattctgttatttacgttactcgattctggctcttcctcttctacagacaccgaggttcttaatcttgttggcatcacagacaccaccactcaaactggaatcggggccggactgtcgatgttcacttggttttgtcagatcgctgcagtctatcttgataaacgaattgggaagaagacggttctattgtgggtttggccaactctattgcttgggttgattgggatgtgtgtttcctcgtgagtgaatgttctagtcactttctccactcgtttgctgtcctgatatgttttcaattctttccacagcggcgtgtttgcaaacacgggtgcggacagcaagagtgcaggaattgcaaccgtcgctatgttgtggatttatttagggttcttcaactttgccaatcccgtcttgtactcctaccctgccgaggtccagacctactctcttcgaagtaaaggtctcttggtttggaacactttgaaccagtgcatgggtgtgtatgctacttgggtggatgtagtcgctctcgaatctatcggtatgtgcacctacgtcctatgtttgacttcgccgttgtctcatcagttctatctctttttcctcgtgtgtcgtcgaggacggtaggttacaagtactacatcgtctacatgcccttggtcatcattcaatggtgcctggcctatcggtacatggttgaaactcattcatacactcttgaggagatcacgcaggcatttgacggtccggacgctgttgttcctatcatcgataagattcagagccaggagttgcctgcttatgatttcaaggagccttcggttgaagatggtttgggggtcaaggcacacatcaagccacaagtcatttgaggaggggccatgtgtgggccaaagaatcaagaacacccaaaatcgaggtgttttaaaaattagaaatcttatcttccttattttcagtaatctaaaatctctatgactgtttgtctttctatctcttttctcaatcttatttgtagatagactttcttctcaattatttgaatctagccattcttgtgtatgtcatgtcagtgttgcttgtttctgttcgttggggaaacgaaacccactgcgtgattcgattaagcgcaagaggcggacaatctcttgatcggtcggcgctgacgatctacgttctctcatcgatccatcctgaattttctttctcgttcttcaccatctgttcccaaggaatcttcatatgaccatacttgttccataaagacgtatctctcatgacatcctatattctcgcccaacactctaacggtagagatatccatccgagctatacccctaaagagaaggatgcccgttgtccgttctgtcagatcgctaacgcgaatgaggcggatagaaaagcatacactgtttatgaggatgaacagtacgtaggccgattcgatccatcgcatgtgttatgttctgcccctctctatttattccttacactgtgttctctctactgaagcttctttgtctgtgtcgtggttaaattagcacgatcgcttttctaggttagacctcttcctttgttgacgataccgaaagcgcttctctgacgatcctcgatcgatttcactcgacttcttttatcacgatgtccagacttgatgccaattcgacctggtcataccctcttaattccaaagttcgttcgtttgtttgtttcctcttctcgttcgatcggtagttcctctttgggcctgattcagtcttgtttcttggtttttcttgctcgattgaccgatcgttcgaattgttgctgcatataaaggtcacactgtccgaggctggccgatctgtcttcagtagagggtgctgctatgggaagtgtgatgcccaagatcatcacggctataaacaaaggtatgaacacttcgacacgtacctggaagtggagagcatagattgagctccgagttctttgttgggatcgaaattagccacggataatccggatttgaatgtcggttcgttagagaattcttcatcgtcaactcggactaggatttatcaaatctaacatcctgagttcatatccttcaagttttgaatcaagggtttgcgcaagctgtgtcacatgtaattatcttctcttcagatttataccttttgcttaaacagtccgaaggccgtcaccttctgaatggcatcccgttgattgatttgtacgcaggcacatttccatctgattcctgcacctcatccgtcaatgcctcacaagtttcgaacaaactcgctttctgccgatcactctccgatatcccccgtggtcaatcagacggtccctatatcggtgacgacgaaccccatgaataaaagagagagaaataggtcgccagcggattggtcggctcaggaattgatggcccacccacctgaccacaaggagatgctcagaggagagaccgaggcccggatggggtggctcggcaaacgagacggggatgcattgagtgcgaaaattcgaagctttctataagcctgtatgctgtaagaaggagagatgagagatagtatatgtgtgtgtgtgtgtgcaaggtcgtttatagatctcctctgttctaaatgctgcagtctctttcgtgctggttcgatgtaaattcctaatgtaatggactgtataactgtcatagtgtattgcgttgtaagactcgacgggtttcaacccgcgcctatcatctctactcgtcggatgcctcagttcgaccttgatccaccatcactatcaccaccatccatcaactttatttgtacgacaatcgctcacagatggacgcggtgtacaaagaactttccaggctggaagcattaggagcaactacgccaatcactcacaaaagaacaaaatccagatcatcagacgtatctatctcgacccctggctcatcagctacggccgcttctgctggaggatcagccatcaatgtttctttagacacattggtagatcaattaatagcggctcgacgagaagtccttggctcaaacactctggaagtggttgacgagattttgaatcgcatggaagttgcgattgaaggatcaaagtgcaaagttgacgaggtttgttcttgtttcgttatcatcccttgcctctcaatctgtgattcttggaggggtctgatcaccgctgatttcgttaaattcgcctggtggtcgcttggaggacaatcaggcactaaagtcgtatcacaaagcaattggcaaagtcggaacagctctgaccaaggtctgtggaatcacttgatcacttataccggtctatccttgatctgcatggctcacattaagttgtgccgttgattcgtttataggccatgccggagaaccagtcgttccctgatcttggaaagttctcagagaccaactcacatagactgctcggtcaaacagtgatgaacgcattgacgagaagggcggaagagaatacagttttgttgatggaagaagtattcccctattcctctgtctgtccatcggactgatgaagacactgaccagttttatattcgtatgatcaggaacatggatttaagtcctcctctgttgagctcgagaatgctcaacaacttcaccgaacactcagcgcaatcagtgagggagacttgacgcttgctatacagtacgtgcagtacttctatatgacgactgagaacttttcgagtaatataatgcagtcacggctcactaacattggatctaatttcttctttgatccagatgggctacaaataatgctggattcctgagcgctcgatcgtctccgctcttgttttaccttcatcggtcgatctaccttcggaaacttcttccctctctactctcccttcctgctccggcttctccaccgggagtgctcatcgattacgctcgacaatatttcactcctctcttctcattgtatccgaccgaaatcaagcggcttctcggagcgctcttgtttgcgtccaactcggttcagattttccgagattcaccttacgcagatttggccgacccagggttacacgctccgctgctggtcccattgtttgagaaagagttttgtgatcgagtgggttggcccaggaaggaagttcttggcatagtcattgggctaggagcgagtagctctgtaggtaggattgaaaaagcgagaaagatgatgaaggcaaaagtcgggtcagattgggaaattgaggcagagttaccggtatgttgtgtctccctctgctcagacatttcttcccatgcctcaagaggattggtgttaattcttctttacgttcagatcgagatccccttgcctccttcgctcaggtttcactcaatatttacatgccctgtctctagagaacaagcgactccaacaaatcctccgatgatgcttgtttgtggccacactatcgctagagagtcgtttgctaagttgggcaagggaacgtatgtagattacactcattcagttttgagggagttgctcaacttaagcatcgagctgaacttcggcttggcccttttctccaattaggatgcaacatctgatcagtcgaacggcaaaatgtgtgttaaattgatcctttgtcgctatatcatcttgtcatcgacgctcgtatagtcgggaatctttctgatgctgactacgcagcttgctttgcgtctttcccgaattctcaggcccatactgtcctatggttcgtagcggggttttctatcttttcgtagtgttctgttctggcggttcttcgagaaccacgaatttaagcctaatcgagaacggttctcctttccatttctaaaacgcaacaaaaaggaaacctctgtaaactcggctttggaacttcatttttaagcatcaccctctgatctgtctcatggacagttttttaagacttcgaccatctccttctcttgtctccctccatattggcttttttctcttcttctccctctgcttcacgactctgtacaactcagaattgtacttcacgcctgtatccagtcttctagttgcgtactgccacattatacatatgtttttttttcttaaactactatcgtctcatacagaatacacctcatcgggaaccaatagccaagcgttgagaagtcgaactgagtcaacagaagtgaattcaagaggttccgagtgattgatggtgaccttcacgaagatgcataagaaacattctcaattatccaacgcgtcaactgtcacatctaaacgaccatcaccctgatcgattgatcactaccatctgtttatttcccatcaacatatcttccggtcacagctggcgcagcgattctttgtcatctcgtcagattgatagccgttcgtggttgggcgttaggtctctcttgaaaaaagctcctcagaactaggccgtttctccttctgttacgcgtccaataaatcagggatcatgccatcttcccaacgtaccagccctatagcaggtccctcgacaaaaaaagaacctatccatgatgtacatcaggtctttaattccttcagaccggttgagtttggtcagatagattttgataagaattcctgtcagaagcagtatgtggaaggatctcttgcctcgcattccttgccaaagatgccggagaaatcaaagtctggggagagtgaacttcaggggtcgatgtaggtatttccgtttggctcgtttcctgtttaccggatctaatgcatatatgtaccggtttcatgttgatcgctttgtgttgatgggatgtgttctcgctgaaaacatttactcgatagtgtcatccgggaagacaacggccgagacccaccaacaaacatcaagatcattctcgcgggttcatgggctatcgaggcttctaagattgaactcaaactacaaaacacttaccacattgctctccaaggagccaagtttgaaaaggtcgtcaagaatgagaagtcaggcgttcgactgaggtttgaggacggaatattgatgagagatgctcgaacgatgaggatttggaatggatttagaggttcgttcaaggttcagtcttgatgatcacagactctgataataactagaatctaattcggtttgtctttcgtcttttctcctgttatagcggctaggaagtatcgaagacaagctccagcaaattcagactcatggtttgctagatcgacacctgacacgacgaccacgacgacgacggggaattcctcacctgctatagcctctgctactgctgctgatagcaattccaattctgtgcctaaaggtggaaacgtatcgacacgccctctgaaaatatcccgtactctttcctctaccccttccaacagttcagttgtagaaatcgagtccgacagtgtgcatgggtcacctcaagtgccagcatcgtctgtatcaagagcaagtcccacttctatggcggctaatatatcaatgccagtcctttcggatagacatatccggctctctagcacgcctcgaccagacagctcgcctgcaaaggatgcgattacggctaataaaaacattgttccagtacatggaagccagggagagggtatcaggccaaaatcagcagttcccggttggttgatcaaccccaagacggagtctccctcaccatcgaagaagcaggtaagttttttacagcttcgatttaatacccaacagcactcagtcatatggcatatactttgctgatttaaatactgcctcaattgatgatctgacctttcgatctgcttcacagaagcttacgaggaagcatcgatctgaatcgattctctctaacgactcccgctcgtcccgttcatcctccattttttccaccactccgtcctctaagagcggcaagatcaagcttaatgttgctaagcggattttcaagatatacccgtcgttggaaaccccagaatctgaagacctcgtgaacgagatggctgacgtgttcttacagaaacatgacgcaacgcaacgacagattctctacttcaacccaattcttcttaagaaggaaattgatcagataaaacagatgctggaaaacgcacaagaggagaatcttaataaagctcaagagtatctgcatgcactggtcttgagcgcagatccggaagttggagaacatatggggagaaagatcgcggggttaatcgttagatcgttcgcgactccagcagatcgaagggtcttcttcctggaccagcagattttaaaggtcaagataaacgaggcgaaggaacttctccaggagctggaggaagaggaggaagaggaggacgaggaagaagaagacaagatggaagaagacgatgatatgaagccagtagtggacgttctaatgcaggatggagatcaagaagatcagcttaaagaggatcagcctcaagaggatacgaaaccggacgtagctttgctggaacaagtacgcgcagaagataatcttccaaaagaaactcctacatctaccatcttgcctatagtcattccttcccccgtgcccactcctccattggcactcgctccttctccaacacctttcccgatatccgcatcagatccgtctgtgg

SEQ ID NO: 3183 - DNA, 51043 bp, Xanthophyllomyces dendrorhous
  misc_feature (9310)..(9319): n is a, c, g, or t
  misc_feature (25292)..(25301): n is a, c, g, or t
agatccgtctgtggtcgcagggcctaatttggtcagtcgattaccctccccgcccccaaatcaagcccctgcacctagcaaagatactgtgtctgtcgatctagcacttctggatgctcgcaagactaaggagattcctcataagtctgtctcgtttccttctcctctcaacaaacccacctctgcattgcagaagacacactcggcgccagacttggctaagcctatcgcttcagtggagagactcgaaggcggagccacaatcaacactggttcaagatccaaacacaagaagaggacacctgaagagttggaatcttatttgaaagaaaagagagaaaaggcagaacgagaaggaaccgcttgggtggatcatggtcgttatttggagataaaacgacttaggtctggtttgactgtcgaaatgattgcggagggagcatatccaatcgggtttacagatgacgtacgtctagtttctccaatagatactctaatcatcctggttgaacaagatatcctctcaatcttgtctggttctgtacagagattcgagtattctcccatagccaatctgagagacctcgaggtcaaccgaaggggtaatttagtgggcgttgtcacaagtacaaccactaaaaagatggcaagcggtgagtttctgcaaattgcattcgctgtaactacgagctcttgcgtttgatttttgtatctgattctgtacgaaattgttcaatctccatctgtcaaatatatcaacgtacaggcgacttccacacatcgttgaatatgagagaccctagtggatctatttccatagttctgttcacaaacagagagatcaaccgtccggaccctatccctggttctatcctgcttctacgctcggtgaaggtaagacatctgcgtatcgcttctgaatcaccttgataagtaacctgactcgatatgcatgtttactccacatctcattcctgcagaaaagtagctggccgtcaccccagatggtcggtaccgccagagatgattggacatggatctacaccgatcaacaagtatccacgatgaagactcatagcaattttcacaacctaaccattcaagccttaccgatcatcacccatgactattttctgaagctttcaatatggtccaagcatacacttggctatggaagtgcggctgctgttaaagaaaaaaatcagaaaaggcctcgatctctaatcaatgtatcaaaaattgaggttaacgtcttttttgatcttgtcgctcaggtgagtaacgcaccccatctcatcccatccccttcttttccatttcccctttcctatttgtaagtaagacttgagaaagaacaaactaaccaatcagtgggatatcatgttgcaatgtagatcgttcaagttgcgagggcgaacgatgcgctggatctatgggtaaccgatttcacatcccatcctgatattcccgaatgcgaagaacacatgcctaggccagaagatggtctggcgccaaccacagctttcggaagatatgttcttaaagtgagcgcctgggatgacctagccaatgaggaaaatacaagtcttcgaccaggaaagatcgttcgaatgagaaatcttcgaccttggtacagatcaggagctctggaagcgtcaatgtatggaagggctgatagtgggtgtcggattgaccggatacgggaaggcgatttggaagcccaggaacttgtcaggttcgtttttttgtttgtatcttatgaagataaattcctaatatccaaaagccccattgctgattactatttcgatctcgtttgtgaccatacgaacaaacagtcgaagaaaggcattcttcgagattctttccggacaacagagtcaaaacctgaagcctgtgatagaagatgtacctcccgtttcaacaaccgagcctttaatcacagagcatcagtcttctacttcagacttcaatacttcagaacccaatgctttggagcgttctactgcaaagttggctgtcacgccagacgaagtatcacctggtaaattacgactgcttcgacatcatctttgaaaatgtgcgaagagactgatggtgtgactgcttgttctaaagtgaaacggctatattccgacgagtctcacccgggaggcgtttcaattgaacaaatcatctcagagctgccttgtcctggtaaatatgcaatccgagctcgagtggtagattacttgtcagtcttagcttgaattacctcgtcgtcaatcagatgttgactagctgaatcaatggtgtgtcttgaatacatacaaaatcaaaataaacagccccaagagactagaggactgtattattggaatttgtggtatttgtcaagatcagtaagtcacgatttccctacctgtacagatatccttcaagattactgatttgtggtatgcctgctgaatcaatcgctagtgtttccccctgtagaattcttactacagacaaaggatgtcgagagtgtaacgagacgagagtccgatggatgtatagagtcgttcttcagttagaagatggaacaggatctctgaaggctggtttactcgagggcgatatcgtacgtctttgtctatctctctctttcttctttgttaactaaacgacctaaaagtcgactatgaccaaccctgctttcctgtgtattgggagaaattattagcacgagatgttcccagggcttccattagcagagacgtacctcaacccggcaaacgaagtaatcgatctccttcgctcaaagctcagtctcttgatcccctctatgagatcccccactcccatctctcctactgggcagcagattcctggacctccgttagaagcatgtgtaaagagttattgggtaaaccaccaaaagggagagaatgctgctgaggatagtgtcaaggagaggagctatagaatatttgcgactacgctgaaagattgagctgtacaaccgatcgaactatatatgtttatatttctctctttcttctgtcaaatctaaggcacaaagagcggcagaacattcatggaagataaactatggaaagaatatacatgatgatgtatactgattttcggttcttgcaacgccccggtgattgtctacaacgagaaaagacacgcggaattacgtgatagtgattgtgagcagttggatacgggtaagatgtaaagggtgaagaagatgagaaggggaagatcaagatatttataagatcaagggaaagctccaggcatgggattcgtcgtcaacgcaaccttgccacccggtccaactccactgagtccaaccctgcccacaaaaaatgtttctttgacgtaactctgcagaccctttgcggtgatttcaccgaaaccagccatcattccaccaatgaaaggaagcaaaacgttgattcccaaacaggcgaaggcaaggagggctcgtcgacggagaggaaggtactttgacgagaacaaggcgagggtgagcgaaggaggcgtcaaggcggaggaggtgctggaagcgaggtagtgctcgataggaagatcagcagagttgataatggcatcgtcgactgttggcttggaagcagaaggggcagaagatggggaagaggcggaggaggttgtggctggtaggctcgtcaaggcagattcattgttgggattaggatcagaggccactgctgagtcaaccgtctgagaaattaagtctgttcagtgaccaatccgtacaatccgaaaagaaggtaagaaactacgaaagacgccttaccatgactgcttgaccgtcgacaagcttaacgtcgcctactgttctctgatcttgactcggcttagcgttatccaaagcatccaaccctcgccatgcctttccgtctctttggagagcgtcctgatcttgtccgtctacctttgcctcgatcttcgccgctcctaggacaccgtctcttccgtcgaggttcagctctttggcaagtccgctgccattcaagttgctcttttcctcggcctccttcgcagcctttaccggctcttgtttgacttttgtttctttctcggctgccttctttcttttagcctcttcctcgtaaaacttctcccagtacgctcggctcgcctcagctttctctcgggcgatcttgctttcctccttccacttccggttcaaggcatcaaactcggtttttgatttttcgagcttgattttttcgtcaggagatccgtccggaccaatatcggcagagttgccgggaggtccagagctatcggggagcgaggcgataggagcgggtaggggctcggccgtgctggtggaaggagcagatgatgacgatggcttaggcgcaggagggggaggaatgttgaacgaagtcaacaccgcggtctacgcaggaatgacaacacggataaatctggtgggtaagcgtttgacacaagagtaacgaacgagagatggactaatttgacgtaccccaagcacatcgtcagccgggatcgagataacctcctcctcgggttgaacaatatcctcttcacgacctaaaggcttctcctccgagttcgtgtttgctacctcggcctctagtgcggcgttgtcctctgaaacaggctcagcatccacttggcttacaactggctcctgttcggcagcttccgctttttgttcggtctgctcatttatgggcttttcctccacaggagaaattggttgttcctcttctacatgaacgacgttgtgttctgggtcaggagcatgagcggccgctgcagcataagagatttgttcttcagacattgctcttgatctattgtgagtatgtgctaatggcgatggatacgaggtgaagggcgactaagcgagatagagagaaaaaaaaggaagccaattagaacgatgatatgacgcgatttggtctgttagggttatgattagtcatcagtttcacatgcccaacgtctggactagccaagttcgttggtggactgatcgggtagttttgttagtgaactgatcaattggcgttcttacaccaggtcaaccaagaattatcaggatggccagttccaagcgcatgggtgaaagaacgagctggcatgtatagtatttacaacaaagagaggagagaaggactcaacagagggactgattatgtaatctctacatcgacgcgctaccaaccctaatgcgttcggtcagctcacgcgtttgaaacattgcagctcacgcgtccgagacgcaactgatgacgcgactgatgacgcgtgcgacggtcagacacgcgtcacggtgattgatagaatgatcagccaacgagcccgccgcgcgtgtgctgtatctgccaccttcgtctttggccctgcgcgcgtcccccaaaaaacctcatcaacacgcatacagcattcacgcccgaacgatatccatcaccctcctcatccactactttcaatacagttatatcacgatatccattgattttctcttctctttcctctcttcatcctgacactgagaatgtcgattcctaccgaacgtccgttccggaagtttcagagtgaggcttggaacatgggttctaccgtccatgtgaactcggcgaacctgattgatccagaacttcagagtgctttgtaagtaattttattctttcgcactcctcttttatgggttcttcctgtctctttctcggccttcttttgtgtgccttgtacaatctaccactcctctggcactgtgctatagacggtcccatttgcgtccatcgttctactctctaaaccatgattggtcgaaaaactcttgagaaggtatcgtccgaataagaaatgtatctgcctgatgcggtcatccatgcgctcataaactgaacccgagcaggccaatcagtcttttgttcctttgttctccttctcttcgcaaatctcctatatcatcctttcgctttcgttccttttcaagaacagtctaattgtgtcttgcttggtgacttcatcgacacaagaaaaattgagataagatgatataaatctaactctcttgcattattctttatccgttattcctaaacctgacagggcctccgttggagagcgagtccggaacagttcgtaaccgttgtttgctttcttcctatctacattatctcattctttccgactactctcgaccctgaaacctcacgcgcacacggagaaacacttccagtgtcctcttctgagttcttcgctcccatacacctatgctctatccgatcatatctcactgggttctaaccctccttcttgaaagcatcgacaaaataaatttctgatgccttcctatgtttcaaccgtttttgatcacaactcgcctgcaggtattgtaaagtcgaacccgacggtggctacagacccggtacggaagaatgtacctactcggacgttcagccgagcggcatctacgatgaactaccctattgtatccgatccgttcgcagcttcgtcccggtcgacctctgggtttgccagatcgttctcccagtacattccagcacggtcgtttgctccaccggctgaggaggaggacgacagctttgctaacggtataattgagggtgacaaggaagcaccggcgttcggagaaggtgaactgggctggggtgatggtgacgcggcggagaccaatggtgaactctttggtggagagcgattgggagcgatcagtggtgatcgaatccatgaggacgatgatgagtcaatctgttctcctgccccttctctctctcctcctggatcgccctcgcggactctagagccacagatttcctcttcttcccctctacctcctgccaactctgcttctttgagcaaaactcgatcgttcaaaacagttccttcttttgtcgagtcccgacacaacatgctgtccaacctccgagctcaaacgttttcctcacccgaggttgacccagaagaagcagagacgttcagacgacacgcttctgccggatggagagaggatctcatcccggctgagaaagggagattggagtccaagccagaggaaccatggaaggatctgaacttacactctttcgccaacgtcgaagatttttagttatcgcctccctctcttatttttccttctcttcacttttctctaccttatctattgagcggactgaatgggagcctaggagtggaattcagtgcttgaggatgacaaagaccggatcggattggactaaagttttgatatgtgatgcagccgttttcttatctcctcttgtcttgaattccctatgatattacatctgaatgtacactatatataaaaccaaaaaaagaaaatctattcgaagcgaaacaaaataatcaagaatgaagacaaacgagcaggagcaagagcagaaacgaaagcagaagcaagagtaaaagcagacagaagcagaagctaaagcaagatacgagaacacaacctattcatctttttcccttgaccattgtctacctttgatttttctaatcagatccgtttcctgaccaacgaacgacttctttctcgctccacaatagctcggtaaactagtaggacacgatgtcatcccagagataagttacccgttagagtttgtgtacgaacaggtcccgctggcgtcgtaggtgtcacctgggaagttacaggttttgtactttgtggttgccgtccagctgagcaatttcacaggcgttccgctatacgttgctgacgctggacaatctccagaggaggctgatagatccagaggaaggaaaatggaggagaaaagattagtaaggtcgaaatctccctcccctttcctttgataccgatggtggggaaaaagaaagacatactcagggtggaaggacaggctaaattagatgaactactagagttaagaactgatgttgatctcgtgtagagacaagctgcagggacggttcgtctagtcgaaaacaataataatacaaaacagaacttagatgtcaggacgatcaagaagagatgaagaatggatggatgttgaaaaatgagacatacttgtaattgtaagtacatgttgtaccggtagtcccgtaaggcgcaccggtgattccatccgggggataactcgtcctttgatcagaatcgtccgggatggaacttagtgtcgggcattggtctagggtttggcgcgcgaggcaaggttgaagggagctgatcagaatcagtatgctccagaaagggagaggagaagaaagagagtgaaactcacaagagcaaaccgaacctgagggaagagcaaatcgttttccattttcgttggtcgtaccagtaggcgccgcttggacggcgcagattgcgcctccgggaagcaggactatacagcaaatggatagagtgagcatggtggatggatgagtgcttaaaggtgtgttgagatgaaccaggaatgaggatacagattatccaaatggatgaatgcaagatggagaggagacaagttttccaggaaagatggaaaggcaggtagatttaagcaagtttgacctgaagagacagatgagaaagaagagaaagaaaaagagcgatttcaggggtacaagggaacgtcagtgcccttcataatatatattccccccttcatttcattgaacttgaaatcccgattagcaatatagtaaccagatcctatccgtcaaaaacttcttgaagcagcagtatatgtgcgattagcagagcaaccaatgcgtgtcaatggcggaagagctcatcagcgtaaaagatgttctgggatagaagggtaggtggttcggttcgtccgacccgcccgcctgattgaaaattccgatttcggggaggcacaccgctaaaattgaaagctgccgatcattttcataacaaataccgaaattggccgtggaatcctccgacgcgcagctcacatgccccctgatccctgccatcaacatccatccatctgtgatcgcaaatgcactgattgccttgatgcctaattctatcgatgaaccattggcggtttgtccttgaagaatattactgaaataaaagggtgaaaatggacttttcgttctggcacttgttcccaatcaagtcctcactggtttcccaaaccatatacacaccacccaggtgtttcattaaaatggattgggaaaccaggaaaacagaagggaaacccgctagaaaatttttcagctcttcggaaagagagccttgggactccgcgcaaatagaggcaggcagatgatgtctcaagaagagattacaaataacagatgaaattatgtcaannnnnnnnnnaagaacatcatctgcttttctcttagtcctttccaacgtcgtcaagttctcaagttcgagagtgtatgggcgccgtcccattgatgttacaaaggctgggcgttcttcattgatgagcgtatgttagggttaacacgttgacgcgtcggatttgagcgcgtccggtcttttgttttccttctcatttgacaaggtcgatatttcttctatactctacgatcatactggcaacggcaacagcagcaataacaacgaacgacgagccatttacgttggtatcgaaagatctcaacaaagaggaaactatcttaagaagaacacatgcgaatcgaggaactcatcctcgaagggttcaaatcctacccagtccgaacaacgatcaatggatgggatccatcatttaatgtgagttctcaatttcaattgatgctgcagcttgcttcagcatacacttagtcttcgagcggcggttcgtttgattcttgtaggctatcactggactgaatggatcaggtcagtgctttttcatcatgatctctccgctcaggcgagtatttttcctcaaacattcgcctgacatagtttcacggatatataatcatcacaggcaagagtaatattctcgatgcgatatgtttcgtactagggattcagaacatgacgtccgtccgagcgtcaaatctgcttgacctagtctataaacgaggtcaagcaggaatcacgaaggcttcggtgaccatcgttttcgataactcggatagagcgacctcgcctgttgggttcgagaacttgaggcagatcactgttactagacaggttggtcattttgaacgcctatctttctctacccttcaccttatggaccttgttcttctttgaatctccttcatcaagtctcacttcctctcactttatttatcgcatatgctacagattgctgttggaggagcgacaaagtacctgttgaatggccacaagtcgactctacaatctttacaaaatttattccaatccgtccaactcaacatcaacaatccaaactttttgattatgcagggcaaaatcacaaaggtactcaatatgaaacctcaagagattttgggcatggtcgaagaggcagcaggcacaaggatgttcgaagaaagaaaagaaaaggcgctcaagacgatggcaaagaaggacaagaaggttgcagagatcaagtcggttcgtggattgcttctcgttcctattttttttaaaggtcaatttcgatcatagtgctgatgtttccgtctccttctgaacatgtttagctcttggaagaggagatcatgcccaagctggacggacttcggaaagaaaagcggtcgtacctcgagtatcagaagacaatgtctgaactagagcgacttcaacggcttgtgaaagctgttgaatggcagacggctagctcaaatgaggcaaaaattgacgtcgagctaaagaagactcaagtggttctgtgagtatctttcctcactcttccctgttcttatcttatttgcgctgttcgttgtagtgttctgaagctttgacaactgtccgaattataacataatgaaaccttatcagggatgagcggaagcagcttatcacctggattcaggataagcaggccaggatggagagggaagtagaagtcatcctcaagaagagagaaaaggttcgcgattcaatcttcattcatatatttcacagagtaatctagcctgatcttctccaaaacaaaatattaacaggaactcgccaaaggaggaaaactcgcaacgttgatcgaggctgccaaggcgctcggactagaagtcgaaaagctcagaacgcagatagagatcagtgagagtaatatcgttgaagaggagactcagctaagaaacgttcaacagaccatcaaagaggtattccctttcaaatctttgtctgcttagttttctcccttgtatcgttagattctgatgcgccagtcaaaatttatatgtccatcacttgtctccccttagattgaatccactcgaactgccaaactggacgcagccaccatatcctcctcgacctacgcctctctcaaatctgatcttcttacgcttgacgccaaggtcgaatccgacgaatcgcttctgcaatcccttcttaccggtctaacagcgtccaacaagaacactgacgaagcgacatcctctggtggatacatgggccaagttgctgaagccaaagctagactcgcgaccgccggtacagaggtcgaacaggcaaaagtcaggatcgagcatgcggagagagaggttaaggagaaagagccgagagcgaagaaagcgaaggtagaaggcgaaggtttggtcagagagttagacagagcgagagaagacatgaaaaagaagaagactatcttggaaggtctagagggcgatgaggaggcggagagagaactgatggagaagaagatggttgttggagacaaaatgaacgttttgctcgaggttcgtcgttttctttagccgagtttcatttatgtttgttgactgatctgctcccatgtgtcttccgctaaccttctcattcaaaacgaacagacacgagatcacctcaaatctcgattggcctccacgaatttcagctattcagatccttaccccaactttgaccgatcatctgttcaaggacttgtcgccaacttgatcgatcttcccacttcaagtttttcaagctctacagcactcgagatctgcgcaggaggaaagttgtacaatgtgatcgttgaagacgaaaaagtagcgagcgctctgttggcaaacaagaaaagtttacagaagagggtcacacttttgccgctaaacaaaatccagggtcagaatattccggccgatgtaagttcctcgttgcttcaaaattcctagccctctatatcacaggacagcggttctcaatatgttcccttcttttttccaaacccatggtcattactatagaaactccgcgcggctcagaatcttgctcccaacagaatcaagtctgctctcactctagttggatacccttccgaagtttccgccgcgatgtccttcgtctttggtggatccgtgatctgctctgataaagaagccgccaatttggcagccttccaggccaaactcaaagctattaccctcgaaggagatgtatacgatccatctggcacgttatctggtggagctgccccgaaaggagcaggtgtcctagttcaggtgatggaagtcaaggcagtagaagatgacttgaaaggattgaagagagaaatgctagtgattgagacagcattggggaaggtgaaggttggaatggaggcattcaggaaagcgaagagggagctagagatcaaggaacacgaagtcaagttgttggaggagcaggtcaatggaagtaatgcggctagggtatatccaacctctccttctactctcaacttggtactgccatgctcaacatattcttccttcctgttgacttgtcatttagatcgtcgctgaagtggcagagctcttggagcacatcattcaactaaaagagggcatcattgcttccaaggacaaggagaagcaagcgaaagcagatattaaaagactggagaaagagatgaacgatttcaagaataacaaagattctaagttagccgaactcagagtaagttccatctttgcatttcctctttttcttgtcaaaaggtacagtattcacaatcaccctccacttgggacttctttctcctatctatcacgttttgtcagacgtcgatcgtaaatcagaagaaagcaatcaccaaaagttctgcatcgatcaagcttgctcagaaaaagatgcaaaccgctcaactcgaactcggttcgtcttctatgtcttatgtcgacctatatcttacagtgtgcgcagtgatctcaactttgctgattttgattgtctgtgacagagcaagttgatcaggatattgagtccgccgagagtgaagtggaagaagtgaaagctaatctggaggagagccgtaaacaacttgcgaagttgaaaaaagacctcggaaaacttgaggtaagcatattccagcttgcttatcgcattgatagaaagttgttcaggccgaaaccaacgttttcttgttctttgcgcgaccatctaggaaaacttcaacgtggctgatacaaagttgaagtcagagcgagcggcgctcgcttcgtttgatgacgaattgtcctctcttgagcatgatatcaaggcaaagaagcaagagacggatgaggccaacttagacatcaagaagtacgagcatgagcttcagactcaaatggctgaacggacaaagtcgaagaacagagtagccgatcttgaaagacagtatccgtggattcttgaagagagtcggttagtactttcgctcaaaacgattgctatatttgtgaaaagccaagtgcattcatcgacaatgtaggactcattctccctcccgcttccatcataatgaaaaagattttttgggcagcctggaacggtatacaactttgacgggtttgacctggctaaatcaagaagtcgttgtgcagagcttgaggctcttcagaagggtatgcgcaaaaagataaaccgaaaagtgatggacatgattgacaggtccgttcgatttcatttctcctcacgcgttgtccaaattttgaccaaatgttagaaattctcgcttgtatattttgtctgtgcggacatagtgtcgagaagaaggaggccgagttgaaaagaatgatgagcacggtagtcaaagatcattctaagattgagggcacaatagccgaactcgaccgttacaagcgagctgctctggaaactacttggaagaaggtcaacgggtgagtagtttagtcatcatccttcggttcatagcgccatagaaaattcgaatgctttactatttcgactactgatcctttctttttctttcatgttactttcgatcagtgatttcggttcgatctttgccgaattgctaccaggaaattttgctaaacttcaggcaccagaaggtatggatatcaccgaggggctcgaggtcaagatccgattaggcaacgtttggaaggccagtttgaccgaattaagtggtggccaacggtgtgtctctctctatgttttgctgtaaatgtctttgagaattcaaacttatatcgccttctcttgcgtatgatctcagatcactgatcgccttgtcgttgataatgtcactcctgcaatttaaaccggcaccgatgtatattctggatgagattgatgccgcgctggatctatcccatacgcaacatatcggttcgcttttcagaaatcgatttaaaggatctcagtttatcgtcgtcagtttgaaggaagggctattcacaaatgctaacgttttattcaaagctaaggtaagtcgacaaatattattttgagctttttatgtttcatcgtcaagagattcagggctcatttaaaaaacgaactatatcgtttgacaaactgtttagttcgtggatggaacatctactgtagaagtgagtggctcctttgccgagtagtttggttccgtgtttttgttttgcagatctccccgactcatcaagaagaacatgatatgcttatcaactacttttcgctcttagcgcacaatctcgagatcgaccaaccaaaatcacattagacaacctgtcggcggaactaacaaccggaaaatcaccagaaccaacacgatggcgaacagcatggtagatgatgccgactctaccggtcttgaccaatctcgagaggacgataactctcaagggtcaccgagcataggcgttcgcagttcaagaagcttaattggacgttgatctggaacataaatttctttctctctttttattttcttcttatttttccaacccccttctcaatttggtaactttcttccatgggcatcctcattctgtcaaagacacgtcttatccctcgatttccatctcattgaccatataccaagatattcatttactctgtcattagtatattctcttgttcgatttcatagcttcgttatatcaaattcttatgatcctgacactgtgttttaacgccattcttgtttttgaatttcttgtgctgactggagtggagggaagtatttacattgaaacttaggaacacaacaattgagatgagaatcatattcattcaatctgaaggtcttccatcgaaggagtagtaatcaagtggttacgatgcttccctgctatatcagcaagtccaggaagtgccctctgggcgcgcaggttcgaatcctgtctacttcgttttctttttgtctgattcatttttgtttggaattatatgctcaacatctcgactgtgtttgaccccttttgataaccacgagcaacatatgtagctcatctatacagaagaacgctatctataccacttgtagatcaagaagcaattcaaaaaaaaagcgaaggattccacgatagaggtgaaacctcttgatagttccagacttcacataacacattgagttgagtagcaccatgttcttgacggatgggatgaacgactccgagatggacgccctcgagggtcgtcccgaaaggaaacacgatgagatcgaatgagatgcatctgaagcgctgaagagatggctgctgacgtaagcatcagaattcgttggttataaactattctgatcctgcagatcaacttctgtcgcgtacgcccatcgatatctgtccaaccatggccttttggaaaccagggacaacagcaccaggttagtgacttatagattagtagctgagctgaagaactatttgggataaattctgacttgagtgaaaaacaggtagcgtgatcgatcgtgagaccgaagcggagggaggatccgccttggtatcatcttccttgagcaagtatgccaacctaggactacaaggacaacgccagcgactgcctatctataaacatcgtgtgttttgttattccttttctccttggggtgatgaagaatttaacgggtacagaacaagagactaaatggacgcgcttggacaaacccatctatccggaatgtaggggacagattgctgtacttgatagaaaagtacccgatcgtcatcgtcgtgggtcagaccggctgtggaaagacgacacgtaagttgagttcttaaatcaatataactttgtcaaggtggtgcttacacgagacttagactcacttcacatatgatctgtattgttcaatcccaaaccttcagagcttccacaatacctatatgaggccggctgggcagccgaaggtcgcgtcattggatgtactcaacctcgaagagtggccgctacgagtgtagcaactcgtgtggcggaagaggttggatccgttttaggcgatgaggtttgtctttattctgaccatttgtctgaataatgctgggcaaatattgatgggtacttgatcatttaggtcggctattcgatccggtttgaagatctatcgcatcctgagcgaactaggatcaagtatctgacggacggaatgctatttagagagataatgatggatccactgctgtcaaaatatagtgttatcatggtgggattcccatttctctggtctcggatgttattttgcttgttaactaatcagaacaaatgtggtcctcctttgtcgtttcaaaacagatcgacgaagcccacgagaggggcgtgtacactgatttgttgctaggtgtcctcaaaaagtaaagttatgaaagaatattctcgtgtatcctgtctatcctgagacttatatgtgcctttctttctacctggaaatcctttcgtagaatccgtcggaagaggaaggaactcagaataatcatctcctctgcaactattgacgcgtaagtatttcttctcaaccccatatgtacttgctgttaaatatcgcttttgactgagtggatgtgtgatttatcattggctcaaaccgccccgctaccaatggtttatagagaagactttagagagtacttcaacacaaatgtggatggagctggaagagagaatgaaaacgagagtgtcagtacgtaattcagtctttcatctctccgcctttcaagcatctcgaaccctctactagcagtagcaggacacggaccgtctgacaataaatcttatccgggcttgttcacgcttggcttggtagtcatcagtttggagggccgaatgtatccggtcgaggtcgcctatttggacaagcctacttcaaactatgtcgagaccgccgtccaaacgatactagatatccatgctagtgtatgcagtttcagctactctgatacccatctccaataagattaacacactcaaattctgtttcctttgatttgcttcgtctcgtttttttgagctaccaggagccccaaggagatatccttgtatttttgacgggtagagaagagattgatacttgtttacaggagctggccgaccggatcccttcaatgccgaaatctcttcctggtctatatccgcttccacttcattctggattgacagcggatgagcagcagcaggcatttgaaccaccacctagaggtagcagaaaagttgtgatatcgacaaatatcgcagaagcgagtgtaacaatcgagggaatcaaatatgtggttgattctggatttgtcaaggtgagctgatgcgtccgaccgtgatctcctctggttcttttttgtattaccagattctcattctagaactatttcgtacccgtgcaccaaactagcttcggacgttcaatccgcgaacgggaatggacgtcctatctgtcgtgccatgttcgcttgcctctctgaatcaacgatctggtcgagcaggacgaacgtctcctggaaaatcctaccgactatttcccgtctccactcttacctccctctccaccagcacgtcacctgagatcactcgttcagatatctcactcttcatcctccagttaaaggcgctcggaatcgagaacgtcgtcagaggatttgactactttaccgccccatcgagcgagatgatgaggcgtgctttggagtttttggttgggttaaaagcgttggacgatcgaggaagattaactttgaattcaggtatgaagatggcggagatgccagtggacccgatgatggcagcgatggtgagtacaagagacgtatcttcgaaagtctctgttatatgctctttgttagctgacgagagatcgggtgctttgtgtgtcagcttttgaattctgcagagttcagatgcgaagaagaagcgttgacgatagcggctatgacttctgtccaggtatataactttcctttcgtgctcatatatcatttcatcctatgataggccagttgctaaaacagtcccttcttctatattcctcccgatcagaacgtctttatcactggggaagggcaggcaggagccttagccgacattgaaaaacggaagttcaccgctgaggaaggggtaaagttgattcttttcatgtttagcgagtttgaagacgatcgttgctattatataactgactcttgtatttgtatctgtgtttgtatatgaatgataggaccacttgactttgctaaacggtttgttcttccttcgtgttggttcatctttttcaacatgactcgattactgaaatatctcatcttcttatcttagtctacaacggtttcactaaatacggttcatcctcttccaaatggtgttcttctcatcgactaaatttcaaagcgctctctagagcagtctccatccgaactcaactgaagaagtacttgagcagattcggtacacaaggaaaaaagatcgagagctgtgaaggagaccacaaacgacttcgacgctgtctaggtacgttttccttctcttctgagttttgtcagaactcatagtaaacccttatcgagaaacagagatttgacttactttgagagacaatgttctttgggattcacttagtgactggttactttaagaatgcagcaagatgggtcgagagtgaagggacatatagaagtgttcgcgaaggcgctgtgagttttccttgttttcttacctctttgaaacgaaatcacaaagacacatgttgcgcccaaacactaatgggtatctgtcaaatcgggaatgaaataaaaaaattaggtcctccatccacacccatcttcggtactattcacaagatcccctacatcaggttgggttgtctaccatgaagttgtacagaccacaaagaatttcatgagggatatcacggtgatcgagaaggactggttaacagagttagcgtacgttctatttcttttgtgattggtccctcattttatgtctttgtgtgtgtttattgacgttgatgctgtgcttgatgtctggttctgtgtgagatagtcctcatttctacgagatcaaagagcgaccgagaatatagagatacaaaagaaatagatatgtgcattcagatatcagaaaaggggtgggtgctaaatgttcggaaaatcgtgctccgcgaatcagattcggaaaggacaaaatgaaaaggagaagcatacagtagacaccaggtgttgactgatccagatggaacaagataagaaagagaacaagatatgaaagattaccgagcattcctaaatggattattgcttcccatagccggcttgcctgtcgtacttgtatccggtccatcccatcctatgccaaatccagagatcagagcagaagcagacgagacgtccgttcgaccgaacgtgatcgatagatcttcccgcccaccttcattcttctcgttaatcatccactcggttctttttggatttgactcggtcgagatataatgacctgagcgggtaggagaccgagcaagatgtttgaaagaacggagagagttcaatactggtttgacatttttgaccgagcgatcatcgtcagggctccaaccacattcgctgtcatccccttcgatgaactttgatgtactcgtcgctgctgacactgtctttgattttgtcggcgacgggccgaatggttttcgagggatgattttaagtccaggcgttgggcggtgagaagcggaaggtattgtttgattagataacgcgcctttggtcggagcatggggagggggaagatgatccctaaaaagcgcaggtataggcggtgcgatatttgacctattattgaacttgagagtcgatgtcatcgctgatttgggcatcggcatcggttcgagctgacggaggtataggtctatgaagtctgatactctgtaagcaggcgaatatgtagccaccccctcatcttcaactgttctatcttcaaggtctgttcccctcagatttcgtgtctttgcaagaattttagaatctacgatgcatcgcggctcggaagagtagggacgagatgattcggtagacgtatatcgtggttccggtcggtcagactcgaaagtataccgggaagtgagcgaacctcgaggtgattcaatagtatgatcagacgaagtgggcgatgatgaagcaatgataaaccttgcatcggttggagagtccggaaagtacctcgaatcgttcctagacaagccctgtgattggcgatcgccattgctcgtctgagaagaagaaatatgggagagaaagatagtatctgtaggcaaaggtgtatagggtggtggatgattcctcctgccctgcttcttgaaaccaacctggtttctccatcctgtttctagtcgaagcggcttcaaatattttgcagttgttcctttcttggaccgttttctttcttcgggacgttgatcctgatcggcccatcggtcctccatcgtctgtctcgctcggcgcatgactctcaagacgttctctacacccagtttcctcttttgtttatccacttggacgtcatctagcccttccgcaaatatgagggtcgcctgcttcgtcttccgtcgttctcttctgacgtataaccagatagagagaaggatgatcgatagacaggcgaggaggattggaagactgattgatagaattttacgcttggtggatactccagaggtattggttgagagatcggataggcagatatgcagaaaagggacgagactcgtcggacaagtagagttgatacatttaccagaagagacgatgttggtcgccaacgagcaggagagacattgggagcttgatgggccgaggcaacttccacaagacgctgttatgaagtgccgttgagtgtgttatccgtaagatgatataatagaaggagcaggaatgaactcactgtcgcaggactcgcaactattgagagttgagttgaaataggccgcttggtcacaaacgacaagacatctcccatctttcaagactggcctatcagtcggacatgctgtgcactgattgactgcctgcaaagcacgaaaaacaagaacgtttcgacgctgattagatccggaggttgacaaagaatgagacgaagggaacgaagagaaagagtcataagtcacccaccgaaccagaacaacttgcgcaatctccatggcaattcgagcaaacctcgttggaaagaaacgttgcggctggacacgatgtcacagtacacgaaccgttgtaggcgactttactagagtttgatgggcaggtcagacagtacgaagatgaatattgacatgtcccacatgatgtatcgcaagctatcccgcgagaagagatgagtatagattcgccacaagaagaaacatgtcaacaacgttccttaatgagagccaaaagaagcggatagaagagggcagaaagagaccagatgtaccagagcaggtcacgttggcgcccacttcgttggtgaactctccattcggacagctttctacacacttcccctcgacggacagagcccatccggaaatacaacctgtctcaactagttgagatctcacagatgtagatgcattgtatccggggatagcgcagctcaacgatttggacggacatgcttcaagagcggacagaaaataaccagtctcagtcagctacatcatcactatgtcttctcctattctcattctcctctccatcgacagataggacgataaatactcacagtcgcactcttccttactagaatcatagtagaagcttcctttgacgatcggactatctgtatcttgacatatacccgtggtctcatccacggagacacaagtcgaccgaagcagcttttttgaacctgggcaagccaagcaagagttttgatctgccgcaaagcatccatcgcagagtggggagcatctacatggaacgcaagtcggaacagggtgtcaagcggaggtttagaaattgttgggaaggacattgagataggtcattcactcacggttcacacaactttgaggaagtactccagtagttatttccttcacaaactgaacccttcccactcggtccgctggccctgacacactcccccaactcaatctcccatccgtccacacaagctgtcgccacacttggagacttgcagctaagtgaatttttcggacaggctacacattgatcactagagaggatgaatccggctgcgcaagtcgagcattgtagatttgtgagattataagttggagcggaagacgtgataatgggcgaagtccagccggcggaacatctgcaactggatgagagagaggagccttggcattcgccattcaggcagtagcaagctgttaaatcatcatatcagaaactagtttctacaaggagccaaaatgggtaggaatgaacacgatgttggacaaggaagagacgaactagtggtggagttcacggtcgaggcaacgcaattccctgtaccgttgagtccgtcggagcaaactccggatgtacaagacccggcacagtcttggcaatctttcccaaagtatccaggggagcatagatcacaaagtgatcctgtgaacccgagtcgacatacgcaagccgaattctcgccggctggagacagagagacgcaagagcctccggaagaacaggttatgttgcaagcagctttggaacaacaagaaaagatcgatcttgatctggtcagcgactgcctgattgaccgaagggttgacgagtataacataccagactggatgtcgagcacttcgacggatacagtttctgatttgtctgtggctcttgtgagaggaagttgtttgacatgaccgacagaatcccaactgacaatctcttggttgtttactttcaacttggcccacacgttgttacccagtacccaactgcccactcttaccgtctgattttgctcgatagtagcacctgtctgaaacaactgagtattgcccgtgccaatcgaggaactatagaagagtacgccttgagttggaaagagtctaagcgagaagggcgagactctggtggagacagtatagttttgaaaggccgttatgttgtaaagaggcgcgaggatgggaagatcggacgagctgactggtatggtagaattgttcagcagtccttcaggtagagaaatggtgtaagtcccaggcaggagcaggacgtctgtttctggcaagtgagctccgagtgcaagctgtttatacacgttggaagagacattcgagcaggatgtgggcgagcaaatggtgtaggtcgattcggccgaggcttatgacgattatgggtgtgtgtgatgagagaacgaggttgtcaacagcttaacgaggtaagatgagagaggggaattgacctacctgctaagatggtcagtgcaacgacggccgaccggaaagcgagacgcatatcgatggaagacgcgacagacgggtatgtacgagggttggtcaattttcagctttgctggctagtgatatcttgagagtgcgtgagaagaggtcagtgctagtgatatggttagtgcccaaagactggagttgaataaggaaagatgatgggaaggaaggaagaaataaagagaaaagaagagaggaagagaaaacatgatcaaagggaacgttgttcagatgtatatgtcagtttcacttcgtgctggtcagcgcacacgtgtaggtattgtgtgttgcatgttaggtgtgcgattagcatgtctggtcaagagtcagtccgaatcgaacaaacgaggcaggcaagaacgatgagagatgagagaaagagaatgagatgaaaggatttctgtcgagacaaaagaacggacatacgatgacaaaaggggagccggctgaaacaaagggggatttgcccatgtatgagtccaaatggacccggaccggcccaaatccgctttcccaagttttcccaactgcccccaagtgtccccggggaaagctgaccagataccccacatcggatcgagaatgttccaccggtctgcccagcaaatcacacgtcatccctgccgcggagattaaccaaacaacggctaatcgcggggtccccgccggtacctgaccggattgacgagccgaacgattcatctagtatcaagtatcactgtgttaagtcatattaagcccacataagcgtatctgatttcctcatcgcctacctcgactgccctgtacgggccgtgatgggccaatcgatgggaaagatgagcgaacgatttgccccagaaaagtgaagaaaaaggggaaaaaaccccaaaaacggtctgtccccgcgaagtttccacactttttttttctgtcatttttctcttgccacctcgtccctttttttttctttcttctttcaccagtttctgtgttgtcatcatcatccattcgctttcctcttcttcttcctcttcatactttataaaggaaaaggttagttctgcgttcggaatcccgctctttcctctctccatcatcaccaatacaccacccgaacagcatctgatatcttttctttttttctttttnnnnnnnnnnttcttctttactgtttccatctctacccactgtatctcttcgttcttcccgctgttttcttcgcgcatctcaaaactccatctcttgaaaaaagactcaagctcaacccaacactacacctaccacttagttttataaatcatcatgtccttcactaaagaagacgaggtcgctgttgccaccatccgaacccttgccgccgatgtcgtcgccaaagccaactctggacaccctgggttagttcatcaacgattttttttctccagcctttcttttattggtatagttctatctcactaataccttgctccattcgactttgaacgaattttttacagagctcccatgggaatggcccctgttgcccacgttctctggaccaagtaagtgcttttgttctcgctttccaaccgagacagtatgctaggatgaagcgaagagagggaagaaatattaaagaattgagattcatgcatgtgtctgtcggaggaatatgccaattcagaccatgaactgacctgaccgatcttactcaatttctaggttcctcaaggctaaccccaagaactccaagtggatcaaccgagaccgatttgtcctttccaacggacacgcctgtgccctgcaatacatcatgctccacctcgctggttacgacctcagcttggatgacctcaagtctttccgacagctcggatccaagacccctggtcaccccgaggttcacgtcactgacggtatcgaggtcaccaccggtcctctcggacagggtatcgccaacgccgttggtctcgccatcgcccaggcccaccttggagccacttacaacaaggagaacttcaacttgattgacaactacacctacggtatgtgtcactcttcttttctgtcttggccatagcgcagatacttactcgtcctctttcatccatcttcacagccttcctcggagacggttgcttgcaggagggagtcgcctctgaggcctgctcccttgccggtcaccttcagctcaagaacttgatcgccatttacgacgataaccacatcactatcgatggggataccaacgtctccttcaccgagaacgttgagcagcgattccagtcttacggatggaacaccctccgagtctccaacggtgactctgatttggattccatctccaaggctatcgagcaggctaagacttccgacaagcccacccttatcaagctcaccaccatcattggtttcggatccaagctccagggaactcacggtgtccatggagctcctttgaaggctgacgatatcgccgccgtcaagtctaagttcggattcaaccctgaggagtcctttgccgttccccagactaccaccgatctctacgccaagcgagccgaggttggagctaaggccaacgccgagtgggacgcccttttcgcttcctacaaggagaagtacccccaggagggagccgagttcgctcgacgaatcgctggtgagctccctgagggttgggagaaggcccttcctgtctacaaggccggtgattccgctgttggatcccgaaagtactccgagatcgtcctcgaggctctcgcccctgttcttcccgagcttgtcggtggttctgccgatttgaccggttccaacttcactcgatggcagaaggccattgacttccagccccctgctactaagttgggagactactctggtcgatacatccgatacggtgtccgagagcacgctatgggagccatcttcaacggtctccatgcctacggagccatccttcctttcggaggaaccttcctcaactttgtctcttacgccgccggtgccgtccgactctccgccctttcccaccaccaggtcatctgggtcgccactcacgattccattggtctcggagaggacggacctacccaccagccggtcgagaccgttgcttggcttcgagctacccccaacgttgccgtctggcgacctgctgacggaaacgagacctctgccgcctactttgtcgccatccaggccaagtccactccttccgtcctctgcctttcccgacagaaccttccccagttggagaactcgaccattgccaacgcctccaagggaggttacgtcgtccacgacgaggagaacgctgatatcaccatcgtttccaccggatccgaggtcgccatcgctgtcgaggccgccgagaagctcgctcagtctggtgtcaaggcccgagttgtctcgcttccttgcttcagcgtgttcgaggctcagcccgctgactacaagctcaaggttcttccttccggagctcctgtgatgtccgtcgaggcttactccaccttcggttggtcccagtactcccacgagcacttcggtctttccggtttcggagcctccggaccctacaagcaggtctacgaccactttgagctcaacggagagggtgtcgcctcccgagcccagaaggtcattgacttctacaagaagaagggaggacctgtcgtctcccctcttatctctgctttctctggtgtttccgagaactagatgtctttcttaatatattctctttctacatacaatcggttctctttccatgtcttccactcttgatttcttgtcgatcgccaggcttctttctgggatctttactgtacagatgaaacatgtttccttaacgctctgagttataaaagtcacgtgaacgcgtctcggtcctgttcgtcgtcggcctcctccgatcactcacttcctccgtctcatcttgcctccggatccgctccaccttgaccgctgcctttttttcccttctacttcttccatccgacattcatctgcaaaacaaattgtcaagttacggcagcaggagaaatacagtgatgtcaaacacacaatcgcaaggtccatatgtatgttgagttgatctttacggggctcaagatccgttttggccaaaccaactagattctgattatgctttccgttgttgcgtgtcccatcagttcattgggttcgacgtaaggcctcttgattttgccttcatcttgcttcttaaacaaaacacatcttttaattaagcgtctcgttctcgtattctatcctgtctacaccgttcgtcttttggttaactggacacatcgttcactgtaggtcggcaccggatccgccagagctgctttgttggatacatccggaaaactcttgtttgttctttcttggtatctttgccgaggtaatatgcttgatactccaagatcttgtcactgacccaaggaattcgccttctggtttcctggatgatctaccaaacagagctgagtccacccatcagactatcacattcagagatccaaaagaccacacaatctttgagcaatctctgacggatatctgggatgccatccgaaaatcctctctcgctgtcctcgaatccagcggtgtatccaaatcggatatcagaggagtcggcttcgatgcgacgtgtagtctggccgttaccgatctcgagggaaagccagtagaggtctcgaagggcgagaatttggggttggcattagaccatggaaatcgaatcggagaggatagatcgatgatcctctgggctggttagttccatctcgtctatagtccgtttgcattccttctaacttacggtctccgcctcgggttactatgtgatagatcacagagcagaagaagaggcaaagttgatcaattcgaccggacatgtcgtcttggactacgtaggtggtaccatgagtgtacgtatcttcatccatcgcaactttcaaagcctttctgtctcttggtcggacttttcaaaatagaggcgccctaagcgtatttgatgtcggcgctcagatgttctcgtagaaggaaactttcatctccatctctcattctaccctgtcctgttttgctttgatccagtctcggggaagggcttacatgaagcatatggagtatccgactggctggaagttggggttgaacgatgatgtgagctttcactcacatcagatcacagtgttggggatcagatcagatgctctgggatcagtttatctctcgcagcgatcatctgctgtgtagacttaagaactgaacgctcaataattttggtttctcttttgcgctggcccggcttgggatgcatagctcgaaatggagattccaaagacgctttggttgaagaaacatatgaaagcagatcggttcaagaactgccagttctttgatcttcctgattatcgtacgtactgttctcatgcgccaatcttatgggtatcatttgagaggttgtagcttgacggctcttttgttccatctttcagtaacctaccgaagtaccggttctttagctcggtcgtcaaactcgctagtctccaagttctcatacatcccgccagatgcttccgagtccgccccttcctcgaaaggacctcatccaaagtcagatggctggaatgaagagttcctcagaaacattgggctggaaagcgtggtcgaacgagggctcgggcagatcggaggaaaaaccggcgagagtctcgatgtcaaaggtgatggaagcgacaacggggaaagcttggtactcactgtcagtgtccatcttgaaaccttttcaatgataattttacctttcgtatcactggcattggcttagtggattttttttgtctcttttctaatgaataggctggtcttccagtgggtaaaggactggataagcgggccgccgaagagctagggttgctcgagggtacggcggttgggtctggagtcatcgatgcttgtatgtttgaacaactcgtcttattctcctctttgtgaatcatactgatcccgctgatcttcgtaatctcattcagacgctggctgggtgggaactatcgcggctcgatcaacggacatgcatgattctaatccagacgtgactctccagaatatggctccgccgaacctcgttgattctaccatgagattggctgcagtagcagggacaagtacttgttatatcgttcaggtatgtgtctgattctgtctcgtctgatctatctgaacaaaaaattaagtctgaactccctaatctatacagagtccagaaggtgtctttgtggacggagtatggggaccctacaaaaacgctatgtacgttagtctttatgtctttatgtcttttcttcaaatttactaacagcgtttatatctgattttttctagtttccctggatattggatgaacgaaggtggtcaatcttcgactggtgagcttatccttcaagaactcacacacatctatcggcgcgctcgaattatactcatcagctgtcatcttctccttttgtctcactaaacttgcaggtcaactcatcgattttatgatcaccacacacccagcctaccctcagcttctccaggtcgcgaaagaccaaggaacgaacatccatgaggtccttggagacaagctagaagaactaagagtcgagcggggagtgaagacacttactcatctgacgaaagatcttcacttggtgagcctttcttttattggattatgtcgtgatcgatatcctatactcaagtgcggggagaggtgccactgacgaagcaatgagtaacggttgacaatccatcagtatcctgatcttcatgggaacaggtcgcctctggcggacaaccgaatggtacgcgcatttcgcttctccatcgttcatcataaacatgactctatgatgctgaatatttcttgggtttgaacatttagaggggaagcatcgttggtctggcactcgacagtacgctaggagatctcgccttgaagttcaacgttacgctcgaggtaaacaccgtctatttcgtctcgtcgcgtgagccctccctatatgactgatcgctaacacgccttgattgatcataggcaatcgctcttcaaactcgacatattttagaggaaatgaactcgaaggggcataagattgatagtatctacatgagtggtgggtttcaatatatttagctcatcgttatcaactctgccaacaaccaaactcaacttatgttttcatgcttttggtacccattctctaatgaaacaataggtggtcaagtcaagaacaaacgattgatgtccctcctttcatccgtctgtaggatacctgtcatcctcccaccttcatcttcagcggcagtggtctccggctcggcgatgctcggtcgatttgcggctgaagttagtgaaaagttgggtcaagagccgatcagctcaatggagatggccaagaaggctggaaagggtatgaacgaacgactttgggagatcatggttcgtttttcacacctctccttcccgtctgtcctctccacttcctcacaaggatagtgcgttggtcgtatattcctctcacatttatgtaactccaatccttcaaggtggaaatgaccccacctggggctcgagtcgaacccgaggccgagaaggacgagatggcgctcttggatgtcaagtatgaaatcttcagggagagcatcgatatccagaagaaatggtctgttcttctactctgtatttcactcacttccttcttcctcttttcttcttctcttcatttgcgccccgtcttactgatttctccaaacactcccttctctctgtattttaccaacacaggcgcaagatgatagccgatgtaaccgaggcttagtggttcaagaagtttcccctctggctggattcaagtttcttcccattcattctattctttcatgtaacatttgtgtagatacggaccctgcaggaacttattaaacagcacgatatttcttcttgttagcgcataaatgatgtcttgagagttacagtcaatgtatagcgggatcaatgctaattgagagaagatctcatgaaaccaggtagccctcttctatactatttccctttgttccaatggcagatacggtggattatacgatacgggatatcgtccgaataagtatgtgtgagaaacaaaccaagcagaaaagagttacaatgatacgaaaggcaaagaaggagatcaagaggtaatgcgacgtaaaagagaggagatgttaagcaagaagagaaagggtctactctaatcctaggcaaatgaccctcacgaagtattcatgcaatctctcatccccctttccttcttcaaataatccaactccatcaattgtccctccactggttacatcctggttcatactcaattctggatggaacgaacaagccatcttctgaccttgtctgagcgcaacgacgttagattctgggtatgcagaagacgggatgaacggtagagtcgcgagaatttcgacaggcgctgacgtcgtcgtcgtaagaggttgatcaaaaggactgaaggacgaggcctgtgaggtagggattggaatagatgtcgatgcaggtggagtggaaggagtagctgggctggtttgggtggacaagaccatcttagagggtaattaaaatcagcattaagcaaggctacataagaaaagaagagaaagttgagataaaaaagaactgactggagctcgaatgaatactccgcaaaatggaatctctgggttcttcaagcttttcgaggcaaggactaagttggactcgaatgactcaagctagaagaagtgcgtttgattttaaaatggtctcgatcagtccttccttcttttggatgatgcaaagaggatataaacgaaagacttacctgattgccgaaaccattccgaagcacggtcgttgacataccaccaaacaggttctgaccaccctttttggctccttctgcctgatgggtaaacacgtcgtgataacaaatgaatcagtacgtcgatctacgctagcatatagagcgcggatgagtcacctttgacgacagcatgatcattccagcgcatgtccccaacacaggctttaccatagacatgtattaaacgacatcgtgttagaccttcctgaaaatcttgaaagtgaggaatcgattacggaccttctccgggtgctggcagaacgcgacaaggggctcgagaaggtttgacctagcagcgatcgctgcaattgctgtagattcacctatatgaggaagataatatgagcgagccggtcagttatgtaaacagaaatcagacaatttgctgtaagggacatgggcggacttgcctccagggatgacaagagcctctatagatgtacagattgaaagatttcgtcagtccacatccgtgttttcatcggtttctcttcggaattcacaaagggtttgtacatgaaggcgagtaaagactcaaagaactggaatcccggacggtaaaaaaaacctctaggtacatctcgaacgaaaccaagagaaacacttactgcatttatcgagatcgtctttcgtccgaacagtaacgacctcgatctttcgttgctcaaacttgagtcgctcgagaaggatgatgtgctcgtaaaaagctccctgaagacctggaggtagtatatgaagcatggccagttcaaacacatgttatctccgtattttgattgatcaagcaagaggccttaccaagaactccaatggtgtaagtctggtattcgtccatcttggtcatgttgatggaagtaatcggtagatcggcgatagaaacatgttaaaaatttctgttaaggtttggccttgatattatccctcatctaccatcacaattcccaacgtcaattacccttctcacttccagacatgcagctcacgggacaggccgaacttccgtctgtgggtagatcgatcaggaggatatctatacatcctgatgacctcaaagccaactcgcttctagcaggagatcttctcaaactgacaacttcagcccaaccttcggtgagtcctttcctcctaggtctctttctcctcaaggattcctcacacctaacacattttcttttgtaatttgactcgatggttctagccatgtatctttcttcaagcttggccttctcttgagaccgaagtaggaagtcagcaattttgattcttctcaataattattcatagaaggctaaccctctaccgctgtcgaatttttaatattagttgcccagctctcgctataccatatcttcaaccttcagccctcgttgcctcactttgtcaacagtcagctaccctcatgcagcttagatatcagaaaagtcaagatagctaaggcagcgatgagagaagccaagtctatcgaattagtggaactcaaggtggaaaatgtggacgtcatagataaagacgacgacgacggacaagagcaagacagtagggaaagagagagcggatgggttcaagtgtgtgcaaaggagtcgataggtttgtctctgtctttgttgtcagttctgattcaggattcaataaaaaaaacgttccattacgtacgctgcccaatgtatcctctcactcatgcctacgttgtggtcctatctcatgcagttaacctcaagcatatcacccctcagacggtcatatatattccactcccgaattcgacgagtccccctagagcgtttcgtatcaagtccgtcaacaaacaaatcatccagaccacctcatctgaatctattgaggatgccattgccgataaagtctattcattgaatttgggagaggaagatgaggctaagtccttctgggttacaagttggggaaccgaagttacagtagatttggaggccaaggaaaaggacattgaaaagtctaaaggaaagatagtgtctgcagcaaagaatagacagactactaaaagccaggagtccaaggaggtaagcatacttgacatgtttgtttgcattgtggattattaataacgcaatatcttcttgtgtgtctgtaagggtacttcggaagcgtcatacatgcgcgttcaccctcctgcttcaaatcctacagccggctattcaacattaggtggtctttcctctcagattcaaaaggttcgagaaatgatcgaactacccctactccaccctacactttacacccatctgtctctgccaccacctcgaggaattcttctctatggacctcctgggacaggtaaaactgcattgtgcagagcaattgcgaattcgactcccgactgctcttgtatcatcatcaatggttctgagctttcatcctcataccacggcgagaccgaggagaggctacgggatgtctgggatcgagccaaagcgcatagtccatgcgtagttgtgttggatgaggtcgacgcgcttgctcccagaagagacgaaggtggtggagaggttgagaggagagtggttgcgacgctgctgacattgatggatggaatgggaaaagatgacgattcggcgagagtcgttgttgtcggtgccacaaataggccgaatgctttggatcctgctctgagaagacctggaaggttcgatagggagatagagattggtacgcacacgccacgcatatcttgagctgacgaatcaagcctgatcaaaattccaaaacaggcgtgcccgatgctgctgctcgactttctatcctccaggttcttctctctgtccgtccaaacgatatcacttcagactcattagctgaaattgcttccaaaacccacggatacgtaggtgccgatttgacgtccctcattagagaggcaggcaattttgcaatttccagctacctttcatcttctcttgccacatctacgtccactggcatcgatgattccataccgacaggtcttaagatctctttcggcgatatgattcatgcgctctcacaagtccgtccatcagcgatgcgagaagtctttctcgaaacacccagcgtcaaatggtcagacatcggtggtcaagatgaggtcaagcagaaattaaaggaatgcgtagagtggccattgctttacaaaagtacatttgatagattgggagttcggccgcccaggggtgtgttgttgtatggcccgccgggatgtagtaaaacgttgacagccaaagcgttggcgaccgaatccggaatcaactttttagccgtcaaaggtcccgaggtgtgtatggtgtttcgatcacaacgatcacaatctctttctgcgcatctgctaatgagcctgctatgtgttcaacaaatcattacgtgctgtagctgctaaacaaatatgtgggagaatctgaacgtgccgtccgggaggttttccgaaaagctcgagtagcttctccgtctattatcttcttcgtgagacataatctcgttgtttctctctctttcaaatggctttgaatgtcaagactgatcagctgtacgcaccgttcttctgtgatcatcaggatgagattgacgcgttgggaacgtctcgatcggatgatgcttcgtcaacccatacgagtggcgtattgacgtcgattcttaatgaaatggatggtattgaggaactggttggagtaacagttgtagctgctacgaataggccagacgtcatcgtgagaatattctatctcgagagtctcgacacggttgtaaaactgacagatcatcaaattgattgaacgttctgaataggattcggcgctgatgcgaccgggacgaattgacagaattctctatgttggaccaccgtcgttcgaagctcgtattgagattttcaatatcacgctgagaaaaatgccagtagaatctgggctagacgtcaacgaactggccaagatggttagtctcttatattttcatgataagccctatatcacgtcttcgttcttacacttgtgcacttatttgtatcgttctcatcgaaagaccgatggttgttctggagcggagattgtacaaatctgtcaggacgcggctttgagggcaatgcaggaaaacatagaggctccctacgtacgttcccgttttcatggacgtaatatcgtattgaagcatgattcgatcgtgaagactgatgtgtgttctttggaatcttgaattggtacagactcgagtggaagacttccacgtagtcatcaaggcgtgcaggaagagcatcaccccagaaatggtggagtttttcgaggaatggagagatgggcagattgtgcaaagtgcttagatatatacttgtcaatacatcaagctatacggagatgagaatgcagagaaagagagatgttgagaacagctagaaatccgaagagaagatgtcatttttatcaggttatttttgaagacccatcgatgctttcaatccgttcttctctttgatttctctatatctggcgatgaccctctccctctcttccgccaaaattcttgcctggccaaccgaaattccaactctcgcgcctgcactagtctctacactacctgcattggctttgatggccttggaagctagtcgaggaagcgttaatgtaggaggggcttgagcgatatcattgagtctcttcggggcggatgaggggacggcgcttgcaaactcggtcgctcggaccttcttgggcttaacggcaatagcagtaggggtgacagtgattgatggagtagatttggcggtggtagtaggggtgagtttgccgttagaaggatgggcagccggttttgaggttgaagacgtcgcgctgggtccggctttggctatgattttgggtttagactcgctttcttcctcgtcatcgaaattatcttcgttttgagaaccctcttcctcagcctcagcttccatagcttcttgttcggctttgaggcgttttttctcttcccgctcagctactcgggcatcatgcttctgctttcgctcctccttttcttgacgaaagatctcggtagactgttgggagcaagagagtgaaacaggagatgttgtcaatgtggggacacaacagagaaagcagtgaaaaaatgaagcaggagcgcacatgagcttgagcttttttggaggcgacggcgatgttcgctcgaagagaatcctcgactcgtctgttgaaatgagcaagtgattccccagggacgatcttgagcgaggaagatgggcccaaagcgtcattcgtagtggcctgtgagtgatagttgatgaaggaagcccttgtcagacctgatgatcttgatctcctccggttaaatttactgtgtttgccagactcaccttagagtttccagtcttcctctctgatggcgtggccagagcaactttgttcttcttctttcctcctccaggtccgctttcggacaaacccattttgttttcccgctttcgtttcctgaaatcatcttgagtctgcatcgaatttaggattcgcattgctcccttcggcaacccttccctttctagatcttgagctccgggagcttggtcttttccactgttatccgagagaggaatccagaatttcatgagaaaaccaatccactgttgcgtatgaccgaagatcatcatgacttactttgtctttcgagtcgcgtctctaacgctcttcttagcacctgttgagcagcattgaatgaaacatatcaatggaccacacacatcaagaattgttaatcatgaaaacatatctacgtttgtgaggcatgtcttccgaatcgatgaaggagaaaccggtggtggtggttgtgtagaacgagagagcctgcaatttttgtcattattatcttttcgatattttgagtgataagataaagaaccctatacattccgccagaaaaccttcatcttggtaacttcactcactccttcacctccaagcaaactgttgctgactcgctcgagctgctgctagctactgagcacatccatgctaaccctacgaaagtgtttactaacgccatatatgtgtggcctatacgcaagacttttctcgttgaatgatctcgagagaagaagagggacggaaaggacagaaaacacgggaactgatccgcctaaaacgcatcccccttgttcttgtctaccaagctcacattttcccctcgtttctctttccatcctcattccctcacttactcgttcaatcacatacacccgtccaatgagctcgttctcagatttagtttattcaaatttaggtaaacccaatccaacggtcctcatctcggatggggatcgttctagtaacggctcaagtctggatagctgggacacgttcgaacaactcggctctctcaaactcaacctcagcgggagtaaggcagcccactattgaacatatcattcaatctgtcttcttgaacactgactggtagctctttcttctgtagactttacgttgccctcgatcgatgatgtgctgagtagtcatcaacccagctctgaagccagccaatcgacccggctcagtatagccagcttccggtctgattcaccgtccagttcccattatagctctcaatctgtctcccttccttcctctgagaacagtccgtgcctagcatgatctttgtttgttaatctctttgacttgcaaagtacttgacggctgatccattcgattgtattcgttgcagcttcccatacttccttacgcgttcgaatacgaagagagtttaccacctacgatgtggatcattccagccgggaaagcatattatcctttcgatctaccttttctcttcccgaagaaccttccattgactccatagccacgaatcttcctcggagatccgtctctcgctcttcccggccgtcgacttctcctgcttcttcccgacctcaaagctcttgcccacctttgagtccttcctcatattcatacgtatcaggcaaaattagctccgctccatgtgagacccgaagagctcgagcaagctcgacccctcagttaccagcttcggctttggtctcaaccgctctacccacccagaatgaagcagatcaagcgcagagatcgatctcactcaccaagtttgggactggactaaggccgaagttgccaagatcaaagacaacgagtctaaccagcttgcttgaatatttgtcggccatagatcgtggagggcgattgccttcctcgtcggataggccactgggcaggtcgaaaaaggctagatacgttccttcggagaaaaactcggctaaacgagagaaagttgttgaggaaattctctccagcgagcaggtctatcttgagggtctaaacataattgtggatgtcagtctctcttcttcatcactgagcaagaaaagttgttcgattattctgacaaaatctctcccatcttcatatagcacttcatgcaaccccttttggactcaactctagccgataacaatccaatacttcctagagaaacaatcaacacgttgtttgctaatattgttgatattcagctgttctctcaagccttcctttccgctctgaaatctgctactactccttacgctcgcctcaaaagtaaaaccaccctcgcgtctagctctagctcgaccatgactggattcaactctctcaacgatcatgtatcccgatttagtcgtcccttatcaatgccgatcaaatttgatcccctagatattgacatcggacctcagatctctctcacccttctcaaacaccttcccttcctctcgctttaccatcctttcgtttcatctttctcagacgcgtccacattgcttgcaaaactgaagaaggagcacaggccattcagaaattggctggcagaaagagaaagagacgaaaagtgtagacgcttgagattaggagattggttgttgagcgttgtgcagaggtgtccgagatacctgctgttggtaaaagtgagtaagcaattccacgatggatctctttcatatatttgctcctgacatgaggttggttccaatcactataatcaggacttgctatcgtgcacccccgtagatgatcctgaacacgatgatcttctcaaagtccgagatgtggttgagaatagtgagtgtagttcttcctgcgaatatcacgctctgaaagaaacttgaacgccgcgactgatgatcgattcatggcacatgccatcggtttggaatcaagttaccgaaaagatgaatgcacgattacatgatattgttgctatacaaaaactcattgcgcttcatcgatctttcctaaacataccgcctatgttctctttcgtggtacccgggcgacgacttctgaagcaaggtgcgtctccttgatgcgctcgtactccttctcattgaacttacttaataaagtctgccgttcatgtgaaaaggcaacctgttgaaggtttgtcgtaagcgagatgaagataggtcgttctggttattcaacgattgtttggtctacggtaaaaccaacacgatgttcggcggatcacttggagcatcgacatctctcgccagtctgagcagttggcttaatcttccgagttcagttgcgggacttggcgaaaggaaacccataggaagacaatctactcagctgtcttcagagggtgaaccggggaaatacatattttcgaggttcataaaactggacgaactgacaatccttggggtagaaagttcgggaacggaaggaaagtcgtttgaactcttcagccctgaagaaagcttcgcactgattgctggtatgttacactctttcttgtccctatgacatgccaaggtccaactggctgacaagcaatggtttgagataaattgtagactcaagagcagaaagaaatgtctggatagaagccatacggggagcaaaacatcagttgaacgccgatttacgaactctcaacacagtagaagagcataccatgcggcggcaccgaagacgatctgtccaagctatgccagtgttctctaccggtctgcacattgggatggggctcaaagtcggaagtctttctttccttgcgactaccttgaatgggtcaaactcaatggaggatgacgattcctctcgactgcacaagggtggagaagaacccatcgagaatttcacagccgctgtatgggtgccagataagatggcggaagagtgcatgcgctgtcagagacaattcacggtgttcaggagaaagcatcattgtcgactttgtggagtagtttgttgccatcactgttccaccaaagtacgtgactcaaaccttctgtctgatgtttgagtttgtttactgatattaatactgcatgaacattgtaatctagtctttcaaagtcaatgattctacaaacaactcgtccctattacccttgtctgctcccgctcaacccgagcgcgcgtgcgatgcctgttttcatgctttgttcagcacttctatcagcccgggagcaaccatacaacacaagcatgaacatgaacatgaacctggtatggtttcgatcgatcgatctcggtcgtcgatgaattcttcaaccacgactatatcgacctcggcgtctagtactccatccatcaaacctcaatcaagtctactgacaaaatcgtcatcatttgatcgactaccgacttctagctctttcatcaccttcccttcctccgggattcctaaaactccgcctagtacacctcgtcagactcaaaaactgacaatttcgcggatcggaatcttatcacctccgaacttgactgtaaacgtcaacggaaacgtttgggtggaaagaggcgaaatgatcaggggtgatgaaggtagtccgaggaatggaacagcggcaaacagattgaggagtgtgttggaaggctaagatctttcaacacattcctcagtcttgaatcgaggatgtgctcctacgcttgactcttttccgttatcccaatcgtttcccttctaagcctcatcagacagctgtttttgtgtagtttacgttcacttgtctcttctttcaagattttcgatatactctgtacagtgtcctttcctcataacttcctcgaatcggataatctatatacaatgacccttttccaaggcgatgaatggggtattgtcttttctggcttcatcagtagaatacaatccaacatatgatcatgagcacgtagactcaagtggctttagctttgacgatgactggtatgagtgctgacacattcgcaaacgaggagacagaagcaaaacagtggagaattagctttgtttctcaataaaacacgagacatgattgtgctgagatacgcacatccagtaggagcttcacaatcctgtattatgcacaaaagagattagatctcaacgtaggtcaaccaagaacagccttgaaacagacaatggtggttaagacgaactttatgatcgacaagtttgaaaaatgagctgatggttcccccatggccaactagagaaacaactatagattttggtacaaaaaggagtcatcccacaagcccgtcctgtcagcttttctctgtgcttattactttgtgtatcacacgatagatgttcagaagagacaaaatgaaaactctcaactgacaggtctgatccgaatattctctgaacaattcatcaacaactttcctcgttctctcaatttgactctgctcggactctcgctgatcaggcttccaaagtatatcatgtgtctcgaacgaaggttcaaattcgaaccgaattgcattgtgcgggttttcgagggtaccgtatgtagttcgaaggaaatatgctgagtgacgaccatttaagcagacgacggaataagtgacgaatgagaggggaagatttgtcgaaaaaatgacatacacgtcgaacgagcatcacacgtatggagtccaatactctcacgcagattcttgaaaacctcagacaacggggtaagccagactattcctattcatggattgaggccaaagacacaaacctctttaaacattggtcgaacgcctgaagaaccgttcatcgcggtatcttgatatgtccagactaacgtgctaactccccgagggtaatcaaagcaaggcttattagctatccgagtctttgacgtatactcaagacgaatggaacgacgacctactctgcagctcgcctaagaggactcgaccagatgatttctgggaaaggaggagaaagcgcaagttcctctttccacacggcgttaacatgcttagcttgttcaatccccagtgaggtgagggacggatctggaccccaagtcaagtttccgtcggtctttgaatccagtcaattcccgataaaggcaatatagtaagaacaaagactgaatttaattgcaaaatcaggttcacatgaacgaacataaagtttagaccagtagtcattccaagactgtcgtcgcgtatcatgtaagattctatgtcgaccattcttcgagaaaccctatcctaggctgaggagtaaacttacatcggtcccatactttgactccgcaacctatcatgttaagacaaacagtcaaggaggaggaccaagcatgcagacggtgttagtagtagatacaaagaggttctcgatattgaacgcacattgtgaaatccttggccatgtctctggaggtaaaaagctttatagaacgttcccctgggagcatcattctgcaattctttgacaacaaacaatcataggtatgaatgaaagcaaaaagtgccaaatgtcagctttctccaatcattgtcagcgcagatagacgggtctaaacaacaaacgaccaactcttgatagtttttcgaaaatcgtcccatcgcgtaggcgagtcatctatcaggcctaaccgaggtagtacctagtccagcacgaggcgtttcgaagtcagagccgtacgcaatagcgtaaacaggcacaaatgtcgaagaacactcacagccgaggcaactttacctgtcgagggcgcatcttgtagaaagaaaccttcgactacctgcgcacaaattgaaacataggaccgtacagattgacgtgtacaacgtgcgtcggattcgatcaataaacttgttcgagaaaggggcaagtcaaattgaaacttgtatgtactgagtaatcatatgttcttccattggtactcgacctggcacacagcattctcatcacgaaccatgcagatcccagaatgatgagtatcagcatgcagatgacaccaacgtgttcgaattgatgagccatcagcttgaatctgttatgagttcgtgttcggatattgccggtagaaattggttcagcgtagatgactttgtgaaccgatgtgttctgctttttaggaataagggggccgacaagttcaggacaagatgtcatcctgagtatttcagtctacaaaaagctcaaggataatttgtctatcagtcagatagatgctgagtggatggttggatgattaaatgatggtaagatgctgagaagagaaggagttgaccggccggatggaagcgaaagacaacaccgaacatggttactctttgtttgttactcgtttactccctcgttgttcagtacagggataagaataggcaaagaaacaaacgatcctgacttctacatgcgatgtgctcattattatcgtcatcatcatcatcatcatagtcctttgaaaaacacaatagacaggtatgaaagcgagaatgggaaccaaaaacaaacatcaagtgtagattatcgatttatttagaagtatattacatcagaatccaactccaagcggatccagcgaaggttccctttctagtcgaggtctttccccttcctgctctttcacaattctcccttcttttccttgatcttctcggactccatttttgataatcgttgaactagtgtcatagctggaaattggactcaaaggatctcttgtcgagatcagctctcggtcgaatgatccttgtctaccatctgaagccacatcttgtatggtcaatttatctagggacctataaggcacgctcgtcggtgaggtcgttccaaccacagatgatgatgggtttgcagaagacaaagtaggaatcggcgcagaagatgatgttgacgaccaggcagaagttgatggcgggagtgttgagaacgaattagaatgtgacaatccagcgttagagagagaaggattggaggaactggaagcaaaggatgcggatggtacaaatcctggagctgaagatgaagagacagatggcgaggatggcgacagcggtgaagatgaggaggcagcggcgggagccagaatccaacatgtatcaccacctgcgcgcaagacagacggtgtctgatcttcttccgaccaagggttttcctccaccgttgattggccgagatgaccattgtttgtcaaggaattcatctttcgaggaattacagagaacggacgttcttcttgccaagcagacctactagaacctctgctggactctcttcctaatggaccagtacttcctccaccacttgcaccgcttccagtactgtttccggctcctcccccgaccgacgcagcctgattggcaaccctccctatctctttggccgcgcctgatagagcgctcctagctccagatgagaactgggcccaagtaccaccccaagaagaagttgaattgttcaactctcgagtcgaagaggcagaagaatgaggataactactgatggtccgagaggaggacgaggattgatgtctagattcgaatgttcacagttcagtgttggtcaaagatgatgcgaaacagagcaatgcttcataccctgtgttcccttcttccgtttgaagatcgacaggtggagagcctggcgaagctgtcgggctggacagtgacatgacaggctttttgtttgacctcggccgataagggaaggaagctcctgtgataccatccaaaatggagagtttaccgtcctggatcgattgactatcctctaccaccttcttgacaactggatcttcctttttctcatagactgccggtgaacccgctgtaggcaaaggaggctcttccgagacaatcactggccggccattcatctcctcatctcctctaccaaacacatctgcccagaacctgacatcttttgggttcggaaacaatatcccggcgtttccctgttgagctagatcctctgatttatcatatctagcgttcaaaaatctctcttttgcatgctcggatgatacccaatcccatacgctgactgttcgatcctgcggcggtttggaacctttcggtccgaattctggtggcattcgtctttcgcgttcagagttgaacaagaatgtaccgaactgacaggtgtaaagttgttcgaggagcattcgaaggaacgtatcgtcgaactcaaaacgagtaggaaattgtcgctgaatttgccagacagtgtcgaggaactgatgaaagacaggggacgtctctttgagatgtgagttggacgaaaactgtttttgtacggaagcgaaccaagcttgagccgaggaggaacccccgcttccaccaccaccgctgctagaagaactcaaagaagtggactcctcctggccgttggttgttaaacttgatggatcaattcctcccccactggtctggtttgaatagtggaaatacttatcggacgataagtgaccacatcggtccaaaaacttgtgtccaaaactgagccaatctttttcaacgagtaccatgaatcccttgattgtcctgtagaacggatctagacagagttgcgcaacagctgagagctgagcggtcctatcccagccatcagaacaatgtatgagtacgtgtgacgaattgatatgaatgttccggacaatgatggtagagccctcgaggattgatgtcgtatgcttcaaccaatttgaccgacggagagcctgtctgtcgagcggtggaggctgaacaaagtcggttgctgagtagtgtcctgcactgcttccaggaataggttcactctcccgaagtgcatcgattaccttattcaaagaatccctcctgaggcaacatggaaggaaaagcaacatcattcaatgacaagacttcaattggaggacagatgaaacgaagcttgagaaagagacgaacatgacatggatgttctcgatgttcaagtagacctttcttgccagcctgtaattgtccatgttttctgttcctgcgcctttagccacgtttgccattgcatttgtcgttggtctcgcatcaacgatcagattggtagccgtcgctccgtatatctgttgagttccggccgtttggccttgagggctcggcgtataggcagagtcattgaacaaatgggtttgaaaaatggcttcaatcaacttttcatcttgaatcgaccgagcttgctttagtccgacgagcggttgggatgatcgagtgattgtggcctgtgatgacccgtcaagcgattggcgaaacagcaatcaacgttaatttgaaaaatgaaaagagaacgcacatcagagctcaagagaaacaagaaaaagaagtaaaagagaagctgattatttacatagttcgcccagtggagatacgtgagcgcagggattcgttctttgctcctgtacttggaagcgtgcgtcaatgccgaatcactgattctagccggtacagccaattttgccggataggtagacgagaactacaaatggacaacactttcgggatcagcagtagaacatacaaagaaaacttgagacatcaagaatctgagaaagaacgcaagtggacaaacagaataatctttatttatatccgtaaatcgccaggcttttgtccgactgcctacgcccatgcgagtaaactcttccctgggagtaaagacgttccagccgtcacacttctccaggggtggagagggagagtatgtaaatgcatagactttctcgattgagtctgttgttttgtccggtgggtgcaggaaagaaagattgttagcttcatagatcttgaacgagtcagactgaaccaaccttgaaaaaaagaaaagaagaccatactggaaactgttagatccttgatagtctcgaatacgtccagacaagttgactcatcctcgaagaagaggacgtatgtttgaaaaagtctggtccgaatcaagattggagcacggccgttgaacgattgaggaagtttattcacttggttgatcaaagggtacgatatctggggttcgaattcacagtcagatcgtcttttatattcagctatatgaagaagaacccagacacacccaaagctcaggagacgaggggcactcaaagatgagatgatgaagcgtgagatggagtgtgcctgtcgaccgaagacctttattttctagctggacttcttcgacctgagaaagttgaaaacatcatattggatgagaatcgaccgaggaatcaggaaagatttaaattcgaggaaaaattagataaataaatcaaaagaatcataagagtcagaggaatcttttggaagcatgagatctacactctcaaccgaaatagaaacggatcgttcgaacgacagagacagaaacaggaggattcaggtagttcactgaccttggaaattcttatgacatccatcgctcgcaggtacgaagttatgagagtaaactaagagcaaacaaaacgaaaattttgcacctagaaagaatcaagagaagtttgaactaaaagaatacaaacaggaaaggaggaaagagggacaaaggcgcctgatgatggtcgtggtgatgatggggttcaggcggcgcaaatgacggaatatgtttgatccagatgagattgtcggcctatcagaaataattcatcgcctaacaatcaaatgagctgcactctcctatagcactcgttgagctcaacgttccttaattgtccttgcttccaaataaaagtaagatttcttttcatcttctggtctatctcaattgtttttagtgaagtccatcattctcagttatgggaacattgcaatcgttatacattttatctgatgaaagtttttaaaacttcaagactttgccattcaacgctctgatctcagcaattgggcattcgagcacctcatcctcgtccactccattattcgactcttcggtgtcataatcatgttcaagcctaggtcgaggtttcaaaatatatcggatcgagtttgaatcagtgcagacagaccgaacaagtgcgacgagaagtgtcagttcgggtgtgtatgttttcgggttcaacgttacgtcctggaatatgaaatcgagaagatcacagaacaggtattgagtactaggcgcaggtccacgagcaagacgaaggttgacagaacagattgaaaaaatagaaacgaacattccaacctatgacactaccctgcttgagaccacttgatttgatgtgagattcgccatctagacttccccaggcatcttctaacgcagcccattcactctcccaccctacggtttgttctgatactatgctggaagcagaaggaagagtagaagtagaagtagaaggagctagaacgcgctcaacaccttcttcttcgtcttctccataatctaagaagacctcggtatctgtgcgagtccgacttctggggatggaatcggcctcagcttcgggctcgggctcaggttcaggctcaccgaaataagatgcccaagcaccagagccaacgactctggcccaagaatcagattcaacatctacgcttgacacccacatatttccaggaaggacttctctatcactcggtgcatcaaacctgataaagctcttgttgtgattgttgttattcgtcggagtggtcaccgaattcagttttgcaaagaaaggctcaggacgtgtcggtgtagcgctgacagcggatgcggaaagagaggacgggggagggacagaattgtaagaaattcgagtag

SEQ ID NO: 3184 - DNA, 28716 bp, Xanthophyllomyces dendrorhous
tcttgagtagcggttgagcctgcgccgggtggtaccggtgggttagctgggataattggagtcaaaatgatagtggagctgatagaacgagaggaacgagtgggaagattttctgaagcaggcgtcacattcgaaaatgattttggagcaggttgaggtttcttagacgattgaaccgaaggagctgaagatgatgatgaggatggtgatgaggatgatgatgaggaagaagaagattctgaagaggaagagtcttcgctctcacttgactcgaccggaacagacttcttgattgtacgtttatgttccttcctgacctttctctcggcctcctcttttatctgtctctccttctttgccttcttaacttcctttctggcatccttagcattcttcctcgccttcttttttgattccctttccttggttgtcgtgccggcggaaggggggctactcttgcgcgctcgttttgaagctactggtgaggactctggtgaggatgctgacaaggctttccgtttcgttcccgacgcgatcaaggcggtttgtgagattgaggcaagagtgactctaagatttaggattatacaaagtcgattagtgcacacacacaacatgaataggcctaaaggagactcaccgcacgacatcatccggggcaatcacgttgatagacgtgtctgctaacaggtcgaacccatcaatagacaagcgtagtttaggcttggttacggagcctcggtcatcatcagctctgcataaactggggaagagatcgaccaggtaagattccagatgatcaatcgtgcctgatggtagtaggctctcaggaacgagtacccatgccttgagcggacctgtcggtgtgtcggccgagagcttgaagcgcatgcgttacagaaaagagggggggaaagacgttgactgccggttctgagacggcgatatcaaagcagaagaagggccgtaagaaggcagtgcaggaacgatgtaaaagggcgtgtgtatgtgtgggtgtgtgagtgtttgtaggaaaagtggtcgaggtgactgaatcagggcaggtgtttctgaggtgaatatactttgaaacggtcgatctattcgaatttcctcttgacattacgtaatcgcttctctcctggattcattgccggccatctctctcgcagttgggccgcttaattcagggacatttcatcttgtactcagtcgatcaccagctcacccgctcacttgttcacacctgccaggtacagacacccacagatggcttcaccacgggcttcggcctcattctcgaccctgttcccttccaggttccacaagaaggaatcgcagtcgtctggaccgtcatcccaatccgtcggcggcaacagcaacggtaacggtcgttcaagagcggcctccagctcgtttgccatagtcggtaatgcttccaatggtggaggcccaacactcgcccagagaaggtccacagagcctctctctgcagagttcctttcgcccagctcggcaatagggccggcctcgactgtgcaatcttcgttgtcgtcagcctcggtgctgagagtccaaatgggaggatcgttcagacaacaacctgggcaatcgggcgatcaggacgatcagaaggtcgaagacgaggattcccttcaaacaccagttgacgagaaacgacagcgaatcctgcccacagaagtttcggcgtcgcccatgttgagtttcgccttaccggtaccagcctctgcacaggcaccgtcactggcatcaacttcagcacagacctcaccggcactgtcctctttagcaccaccatcatcaccatcacaatcacaactaccagcgatgaccaagtcaaaaacgaggagaggctttggagggatcccaaagaaggcgaaaccgtctcagggagtttccggtgcgttggtcagtatgtctaaagacctgattaacccaaccaacgggctcgctcccatcccggcttttcgttcaagatcaggctcttttgtgtctgaaggcgaagaaccggttgcttctgtcgccgctactaccgccactgctttcatgcccacggaatctcctgttcgaaagaaaggtcgaaagagagggttgactgcaacctcaaaaacaagcgaaaaatcggaaaacacgacctaccctgtctatcctccggtcgcctctccctcactgaaaccatcagtctcgaacagattgtcgtttacctcaacagagaatggggtaaatcggaccagagcgagctccatctacgcgacttccgatcaggacatgtacgttcattcaagttctgcaccagaatccgaacggactgatggcgaagatggcgaaggctggagtgagggggatcataatctcgacggttacccagctggcgacgactaccactcagtcggtcctacagacagaacccggtctggctcgatgggttcaggaaatttctctaataactatactcacaacaacgaccccaacggtaaccacgatgaagatgatgatgaagatcatcacgaaatgtccggtagcgagagtggaggtagcggtcaggcagaatacgacctcgatgaccttccagtcgtgggctttgctgtcgctagtgtcaagcgaaactcagactttcatgccctgtttggaaaagtcattcctgaagatgattatctgattgagggtgtgtccaggcttttcctttcctgccccttccatcaatcttgacgttgcttccccaaactgaaacgaccctttgctaaatagattatggatgcgccttgcaaagggacatcctgctccaaggcagactctacgtctcagagaaccatatatgcttccatgctaacatctttggttgggtcactaatgtatgtctgggtgtttctcatatatttcttgttcagtgttccttcgcgctctccttaccttcatcaatccaacatcgtttcctttttctatcagcttgtcgttccattttcggaaacgaataggattgataagaaaatgaccgctttcgtcattccaaatgctattatgatcaccacgtccgacgccaaggtaagtttatcttgcctctctttcctcatttttgctttttctcttcttacgctctgtatcctctttcttcttacttgtccttcagcacacattcgcatcgtttctgtcaagggacaccgcattcgatgtcatccacagcatctggcgcttatctactccgatcaatcccatggctgccaaccgatcgtcctcatccatccccgatgactcgccccttcagagcctcacctcaaattctcttgctaccgattctaaacccgctcatcagcactcgccctctagcccgttaacgatgggcaagaaaaagattccgagcagaaaacagccgactacgtgccaatgccagctaaacggtggtcactactcggagactgcactggatagcgtgttcccaagcacacctgaaaaactgtacaatctgatgtttacctctggattttcgaaagatttcatgagtaataatcagaaacttatcggttagttcggacgtgatggattagccttctcacaaccaacatatactttgaactcttttcttcgtccgtacgcttaccttcttgcttcatcctttttctccttacagacatccagatctctgattgggcacctcagtcgtctggatcacatcttttgacacgctcgatgtcatacatcaaaccgctccctggtggattcggaccgaagcagacaaagtgcgaactggttgaccaaacggctcatgttgattttcaagactttgtctcgatgattaccaccacaagaacgccggacgttccttctggaggttcttttgcagtgaagactaggacttgtttaatgtgggccggagcaaacagtacgagagtagtcgtcaccactcaggtcgactggaccggcaggagtttcatcaaaggtctgttgctcatattgttctcgtttgtcgtcgccgttgataagcgttgaaaagatcttcttttaacatcatctcaaaaaggcatcatcgaaagctcagctttagcaggccaaaagtctactcacggcgatttggagatcgcaatgaggacatatatcgccgaccatcggactgaattccatacggaaggggtcgatgacggggacgatcttcaagaatccactctcctcaccatcgatccaggttccaattctggaccggccgactcgagctctgccgttcattccaataatctttcttcctcaggaaacgattcttcgattcagaaccataaagatcaagaacgcgcattgcttcaatactcctttgatctttcggttcaatcggtcttcgccgctttgagggcagtatccggaattgttcagtctatcctcaccgctcttacggatatttctgtcagatccggcgtcatgggagccatcgtaggtatcttggtaatttcgaacatatggactctggtctcgttgcgtggcgcaagagatggcatcccgaacgagctcgcgtccaagtcaggatacgaaggtacaaatggagccgatgcgacaggaaggattagaccaagatcggtcctcagacatactgggtttaggtgtaggcaaagcggaaaactgtccgtcgaacgtccggcacagaacgtggagcagacacaagtaggaatggaatcaccagactcagtcgcagaggccgtcagacgtttgtcctttcctgccctctcctcttaacaaacttttttcctttcttcattttgttctttcattgacaggatgatgagattatctgacctcacagtgtttctagaagactatctcccttcagcacacccccaatctcgaccaccgacataccctcacttgcgctccttacccagacacgaacaattctcagccctctcacctcaagaagaaatcgaagaattaagaaactcgttagatgatatcgaacgttggttagagagattgagaaaatcggtcgaccatgtcgttgtcacagaaggtgctgaggagggggttggttcagccgtgggtcacgatccaatcggtcaggccgtttgagtcatatggaaggggcgatcaaatgaggaaggattggcaggtcttcatttatagtttttttcttacttcatattatgttattctgtatacccctcgttcatactgtaccttctcgtatatgttacaatgacaacataagtcatcccattgaacgtgcagtagattatgccttgaacatacgatttgattctttctcctgatgtaccccactgaagatatatcttggcaatgacgaggataatgttatctcgtttatcttcaaatctaactctcaccatatagttttttatgtctcttatagaatgaattgtgataggataattatcaaggggacggaaatataaaatcacatatcaactaacttctcccatcataaacgttgcctcgcatttctaaaacttctcggatccctcaaacagctcggcttccagcccatcatccaccactgtccagtcaacatctctggctgaatacaaagcctcataagccgcagaactggcgtgcgcaaagaagggttcaagctcagatatcgaagagattttctttaaatgggatagacgtggtcttctaaatgctgttgttgatgttgagtgagatgattcgagcacatcgtcaccagattctggcgggtgaagttttccatcattctattcatacaagtgaaagggggtgtcgaaaagaaaggtgtgagtgtcaagaatcagcaaacgatcacgaagaattgatggacaaactttgctgaaatgaggactgtctcgaatgagttcggccagatgatccatcaaggaaccagatatatccccttcgtctgtatccaacgataaaggagtatctcggacgaacgcccattgatgactatgtttctcacgaagaaagggaagaatatttttgatcagaaccccaggttagaaacaatagagaagtatttgagatgaggttgatacatttggaaatcttcggactggatcacgagcagcagatcgaggaacttgcaggccccgaggatctctaataaaagctcagagttatttggtggtaactcctccattagttgttcaaacacccgaagctatcaatatataaaaaatcagcaaaccatacaaacagacgaaacagcctggcgcacaacagacgtacaagctcagtcagaatgataggccacaagttggtgagatcccgggcggcgatccgacagattaaaattcgtagacaaagatagacctcagcccgaacagtcggagataatcccgtcattcttaaaatctcgaccaaactttcttgaatcgcaggcagttgattgagaaaatggttcttttcggcagcaaagaggacaaatgatatccggcgaatattgagcgaacggagaagcatctcagaatctcggttactgaatatgttggctgaaggggccgcaacagctcgagcttgagaacggtaccgagataaatgtgttagtctgacaaacccaaatggtagactcaagcaagataacgtacaaacgagttctgtgaaccgctctttctcgaagtccactagagaacagactagaggtttccatctggcccctgaggaaggtgagccattgaaaaatctcgaatcgttcataaaagcttcagtgacaagagctctccaaaccttgatcgagttgggtatccgagtaatccccacaagaatgctgagagccgtgggatcgacatccagagacctattgagatagatcggcatcagattgtctctcgatgaggaatctcatgaatatattctgactcacttggttcgtacacggagtgcaggggcgacgacctgctgacagagtgtactacaagcggctagaactttatcgctatcggccaagaaggatcgaaggttgggtacagtttttcgggacataaaatcggcaatctaaaacccatagttaacagaggatttatggttgagttggggtatcatagttgagcaaggcaacagaactcaccgcaatatacgacacctctgtttgtgtattgaataccgctggcttttcttccagaggtgtcccggctagatggcaagctcacggtcaatgcacaactcaccatttgacagtacaacatacgacttgatcacttacgaagggcaggtgaaaccattccgttgctgacgtcccttgctcgtcgacggacggaaaattgtccatcgaaagatcgcagagcccaggcagcagtagcgtcaagcaatttggaataagtgtcctgttttggtttgcatagattgtcaatatgttgagcaagacaccgtcgactacaacgatatcaattgctcacctgcagatcacgacgcattctcctgtcttcaagcgcgcttgtggtagcaaccttctcggccaatgctgtcaagcacctgaggtgatgaacgagtgcagggagtcgttcatcaggaggctgacgaaacaatcaagaatatattgatgtacactcacttgaatgagaagaaaacctgtatcttggatgcagtggttgaggctcctacaagaacatccttagtcatagcaaagaatgtcccccaaacctgaactgcaattggaccctcaagtcgactcaaataagcttcgagaaagccataaacgatcgtgtcgttcctttgaagagagtagatgcaggtagtaagagtcatttgacatcagcctgatgtcaagtcatgaagtagcttactcttcttctgtaagatttcctttgccaagtgtattcgttcgtctggttagaagctggcacatgatagacacagcggtctgagcacttgaggctaatgtgtccaaaatttcgaaagagtactgttgttgatgatgagatatgataaaattgattcatcagcctatcttctgaaccatatatggtcaaagtaagctactgacacaattcggattctgatttgaagcccaacaacttgctaagattctaacaacgctcgaaggttgcaatctatagaattgctctaatgccttccgagttcggtcttgaacacgattgtacagatgattcatgccagctgcagctgctgtagaagtggtcaagataggggaagaagaagcagtccaaagagtgtgtaataaagacacggcatcatctagacatcgcagtccagctgatttgggctacgagttatgatagagagtttgattacggatcgagagtgagacatctgaacgcatgacttgagtcagtcaaagaaattttacttacaactgcgccaccttctggagtcgatggtcgagcaagatctgactccgtgaagacgttagaaacataaccaaacaagcctgtggtgacctccgtttgccgcttgtcgagattgggagacaaggagacaggaacagagccagcaggcgccgccagggaaaccactttctctaatgcgttgagaagcatgactatctctgaacccgctgcgttgtgtacggtcgaatgattgatatcttcagagacaacgacatctctgatcgattcagcgagtaggtatagctctttgatcagacaatcaccaagaggatagagaagaggtcggagatgcccttgaagctggggagcagtcatgaggatgaagtccacccaatgttgtagaactagtcgattggatttgaccgagacacctttcaccaacatctgaagtaacagcggactcaaattgtccgatatagagagagagtttctctccacgctaggcttttcatcactaaggtaggccgaagtttttgagaagtcgctattaccagacgagggaagaccttgaacagagatcttcttcttgtgctgggtggacgaagcagctgaagagattatgttttgtaagacgtgaagaagctggttctggatgtcaagtttcgcttcgtgtatacagtacagtagtttagcgacaatgacagtttctgtggtcttgtgactgatggctgagatgtcgccgcgtgaaaggatagactggataatttcgagagcgttgagttgcagtaaaccattggcaggttctagagaagaagagagcgctttactgggttcagattgaacaaacctgaagtagttgaggagtaccagaattcgacacaacacgttagctagcgtgcgcacttcttgacgacaacaatttttttagagataggattgcacatactgtagtaacaactcgacgaggacgtccatgaatgatgcttcggcatggaaaatcttagctgttgtacggaagccaatggcaccaaatcaacacaaatatcaacatcatagatcagacgaaacatttcgcgtgaagacgaacctttggtcgccctttcacgcaatctttcacttccttggctgattggtgtcgccctgatcactcggttcaacgcctgacctccgaatcgactgagactagccaaactttccaaaacgtaattgagccgagcatggtcaatcggccgatcatatcttgatccttgaacctctttgccagagaaagtgaaggttgtcgttgtccggcatatagatggatctaatagaatgcacatgatcgggtctagcattctgtaagaaattttacagtaaacaacaacaggaacatatggactggtaagaaagtttcattctgtttccagctagaaactaacgagcatgggacaaaccgtgtgtatgacttgagatcacacctcaaccaagtttcgcctgctcggcgcaaagacacatttgatgcgttcaaagtatctaaaatgataaagatcggtccatccaacgcatgattggatagatctgaatcctctacgaagcggacaaaccggtgaataaaatttagtgagactagtatcagcctatcaattcgttgaaggtgaagatattgacaaagatgaagctaagacataccgcttagtcgccaaaggactccaaatgcatggatcgcatctaatcttttctcaatcgaggtggacagcatattttggaagagtatagcatcaatatgcttgaatgaactggcatggtgaagctcccacataagatgaacggccgggatatgatagagttgagtgctcgatgtcatgaaacgcaagacctgtgattgattggttcaataggaaacgttgagcctgtgtgatcttagatatcccaacaaaatcttttgtttaggtttcgacgtggttacctacattgttcatcaatgctgacattactagccgactattggtcttcaaagggggttgcatatacggtacccttcccaatcctagggaaacgcgaatcataatctccaacgtatcgaatgaagcggtctggcatataacgcacgaacaaacatctgagcgccaaccaaactctcgaaagatacttgaaagttgtaacacacctggtttgcttgttccctaacttcgttgaaccacgcatcccgatcccattcaatagttccgatatctccctccaaccccacctgtcccccgagatcgatccaatccttcaaaatttctaaaactccacaggtcatatcctctatctgattattgccctgtagagagttactgagggatcttctcgataacgccagcaatttttgaaacggccgtttgaagagctctgttcccgtgaagctcgagcttgtaatctccgaaggaggctgaaggtcagtagacgacgaataataggcggtagcagactctaacggcgtgattccagggtcaccagatgatacagaggcagaaggcaagtgaaggaagacttcaagaggaatctgggggagaatttgacggacgagatccagagcacctgtgatcttagttttctggatatctgtcatgagcgattctgaaagagcgaagaaaactcggtgaagaagctctactaaggtgacaataatgataggtaggtgggtcgtttggatttcttcttcttgttttgaaaaagaccttaagatgaaagcaatcaggtccagagactgatcgtaggttcagaggaaggcattgttagtctgtgagttgctgtaaaatttcaagtcggatgagaggaatgagacctcacgtcgcaaaccagatctggcgattcgaattcattcagtaatccccagaacaagcctcgccagactagatagggatccaccgtttcatacagcgtgcttccagtcatcagacgctgttggaatccaagtcgtgttgaacgaaataagtttcaatcgttctctatgtttgtgatccgagagatacaattaaacagacttgactcacatcactgacaatctcatgatcatctccatttgattcttttagggatctaagcgcgtccaagatcaatacgtcggtaagtggatacccgatttcccatttgtccaacaaggagataaatatccgatagggccgttgaggttctgatagactcgatgatacatcattcatattttcctacgagtgcgttgttgattaggacaggaagagagagacattttgatcagctatctgacttctttgctggaagaaagaaagaaacaaaccttgagcgtattctttagaacgtccagggaccattctcttaaataagcaacctgctcatctgagcttccctctgggcccaatagccatccgtataatcttctacttaaagacaagtctcttctcatgacaactgtcaaggctgaagacataaggattttgcggtcggtctcagtggagaaactgaaagttgtgatccaggtggtagaaacattccgagacgatatcagatcattaagcgcgtacaaactcgcttgtcttcagtcgcgataaacttactcggaggatgcggcgccatctaatctcaaccctgtcactaaaaggtccaatgtccctctctggacaagcagattatcatcttccaacgcggctgcaaacgctcgaatcatcaaccctatgtcagagcctactatcggtgtaatatcttgaaaaatccaaacataattttaatcgtcagcagaacatcatctaaccatgattttgtatgaaatattgaccttctcctttgccaaactttggtaatcgcctgccaagatagcatagaacgtttgttcttgcccctggtgtactgatcaatatcatccagaggttttgaaagaaaatcggtggtgataccgttgatgatacaatatccatgaggtacatgaccttttcgaaagcttctccggcttcctcctccagacctggaagaagggcaagtaagaatgccttgatcgctggaagaagggcattcttcagagggacatagtgtacttcatatatattgaggagcatgggctaagacatgcgtggcaggcaatatcagcgattgattcaaagatagataatctggatgaaggataagaaacgtactttggcggatgtagaagcgtattggaagaatggaaagagaccagacgaccagatcaatagatctctttttaagccttcaagctaagaaacgcgcaatcaatcaacggtcagcgctcaaaactctcgatgtgtctccaggcaggaacaatacgacatgaaacacgatatgattgaaaggtctcatgcatgaactcactccgatgacactcaggatgtgtccgtaaacatctagagctctctggtgaactccactgggcaacgccggagtaagacattgcgctagtctttttgcaatcaacagcttccttgggatttcattgaatccagggaatgtttgaattgtcttcagcagtttggaaagaaaggagataaagtcggcccattccttgatgctctcaaatgattgtagagagcgatctatctgagtctgatatttcttccattgagaatcgtttgatagaagcgagagagcggctgaaagtttatcggcgggtacaagtttgtcattgagtcaatacagagaaagcaggaagacaaatgctcggagaatcagacagacacgaacctttctctgctccctttcctttccatatggacccagttctttttccgattgatcccagctcacccttcccatatccaccgggctgattcgtaccaaaggatgtatcaaccttgggactaacagccgagcgagggttactgatggcaagatggtctcgttttgttgaactctggctgctggttgctgaccggatactagaaagagatggctgatgatgaaggctagattccacactttcagggaggtccatgtggtggttcaattacttctacgtgtattcagatgtagtatatgtgatgaaggcctgaagatatgacaatgacctgtgattatgaaagaaagaggatgtgtctatcggggccaacaggaactggaagccaacggactgaaggaagtgatgaaagagagaagcgtgtatcgaatagaattacgtaatgttcgatatgttgattcatcccatcacactctgtttgaagaccagttccgattccaagttgatacacctttgcgcgcccgactatcacccggtaacctttgacgtagctatgaatcctaaagtacatatacctccatgcctttagcagtctgaagaacagcacaaggagataatcgcttgatagataggattgaatgtttatggaaaagttcagaaactgataatcttgttgttcctcgtctttgtttattgtctgtcttgacagaatcgacatcaaacccaggatccagaggatctttacacccggcagaacattattggtctgttcttatctctctttatcactctaatcgttatagcttcgttcaaatgctcatgacccattcgaatcggctaaacggatcataggcaaaggttctttcggtcaagtatacaaagggtcagtttcattcttagtcaattctgttcgtccattcaatgtttatataaaaaccttctacaattcaaataccatcctctagtatcgagaaacgaacaggagccttggtggcgatcaaaataatcgatctcgagaacgccgaagatgagatcgatgatattcaacaagaaatccaaattctttctcagttggactctagtcgagtaactaagtgagttctgtaattttggatttcaatagtataagtgaaaatcatgtgtctgggctcatcaatcttgtcaaaatcttgatctactagataccatggatcctttctgaaaggaaccaatctgtggattatcatggagttttgttccggaggatcatgttcggatcttgtgcgtgtgcctcttcatggaagtttcagcccacggaaagcgcgcttgttgacttttctcgatttgttgggtcattcttctatttcaaaaactacttgctgaaaccacttggatagttaaaatcaggagtttttagggaagaatatattgcgatcatttgccgagaactgctcaaggggttggagtatttgcatcaggagggtaaacttcatcgagacatcaaaggtttgttctgcttaacttttctctacttggaaactaatctgacatatagttttgtcggattgaacgcatttcctcttacttgtttctctttgacacttattgaatctatcatgaaagcggccaacatcctgctaacttcggcaggagatgtcaagttggccgattttggagttagcggccaactcacatccaccatgaccaagaaagtatgcttccccttgattcattcgaagtttctgagcttctgtcatagttaatgctcatcattatctattcatcttgtctggaagaacacgttcgttggaactccctattggatgtctccagaagtcatcaaacaatctggatacgatttcaaggcagatatctggtcgcttgggatcacagcgatggagatggcaatgggagaacctccatatgcagaattacacccaatgaaggtttgtttcatcttttgttgtcttctgacgtatgtttgtcagagagttgttcggaatttttttccagatcaacgttcatgttcctgttttctgatttgcctatatttgtctttttttctcgtctgcgcgcgaataatctcaggttctgtttctgatcccaaagaacccgccacctacacttggaccacagtttagcaagccattcagagagtttgtctcgctttgcttgcagcgggacccaaaagaagtaggcttgttcttgtatcctttccttttaggcaagagagcgatgttgacttcccgaatttgttcgaaaacctttctagcgaccaacagctaaagatttactcaaacatcggttcatgaagaccgtcaaaaggccaagcttcttgaccgaactactagatcgtcacgaagtgtggaagactgacagaagcgacaaaaagattgaggaaaatgagccgtcaggctacgaagcgtacgttctctcaagtctatcttgctgtttgcgcgacgtatcctcaaaccatcgcttacaccatacgttactcatgtgatattatgttgtttgtgattcatagaggaacgatgggtgacgttggagatctttgggactttggaacgatccgacgggatgttcctcgtctgggtacgatgtccaggtcgcaacctcccccactccccacttcgtactcgtttgccaatgatgactctgtgtcttctcaaccaaaatacatcccccagaaaggatcaacccacataccttcctcttcacctgtggattcatcaggaacctacagctcgctcaacgctcaaaccatcagttcagtatctcgcacacgttcgtttggcatatctcaaggcgatcgagaccaatcggtttctgaaagccaactgccgtatgcatctggaggttcgcctaagaatacgttagcgagatatcaatcgttgaatcccacgcagttcatggagacaaaaacggaggtcaaatcggttccggtggcgcagtatgaaatagaccaggatgctgaacacatcagccattctaatggacaagaaagattgagtgacgatagacagcctctggccaaagtgggccaggacgagggaagagggcccggacacgagtcagagaaggagaaggggaaagcggagtatgatagtgacgaagagtttaggaacgatagagagatcctatactcaacagaatctgagaggatcaggaaagaggaggaaatgagtgattcgaaagcaatactgatggatgttgtctgtcctgtgattgatatggtgggtcattcttatgctgtcatgaacttatttatgcttgggagaattgataggctgacaagctgaaatcgtttgtttcatctcagatcgcgtcgaagataaatgacccggacgcacgacaggctcttgaagttcttcgacgtgcctttgagaatgcagaacgaatgttagtctgttatctccctcaatctttgtattgtgccgttgaagcaggtgtgtgattcaagcaagtcccgatgactgatccgttaacaacgccgtttgacacagtatccctggtgtaacatcggccatcgtagctgaggtttgtgacaatgttgagcaagctgacccagtagaagatgaacagtaaggtgtcaattaaggagattagaaggattaacctaacgactactggagagggaacaggtgaccctccgtaaccttgcatctacaccttttctttctcttgcttttccctatttatattactcgtgttcttttttccttttctttttttcttggctcttcttttctttttctatatacctgcccctcccaaccctagtcatgcataccgtagtgaacacgtccttgttcgttcttttttctcatcttctcttccctcgattgacatcttttgtctagcacgacacactccatcccatacatccattttcatatttcatgtggttttagagaagcatgtttggcacagctgtcacttgacttacagcctccttttcttttgtgttcagcacgaatgtgcaactgtatctcgcttcagttggaatgtgattgttcatcaatgcagcagagatgaaacagcgatccgtttacgattgagatgcttcgacaacagcacagtacacacacatcatcaagactgccatctcgtcgaccgactgaatccaagaaaaagtggaaagcagccggtcgacacaaatgggaagaaggtagaggaggtccctgacaacacaagccggcagtgcagtggcaaggtcatcgtgtccggccgtcgtgcaagcagaggatggccggacgggcaaggcaaaaagaagtaaaccagatgggtccggtggacccatataagtggttaaacttataagaacagatactacacatgatctaagccaaaaggccagagaggatgagggaaaagaaagaagacaggaggaacgctggcagggcggccggcctttatacgtttggtcgaccccccctgccggccggagtgtgaaaactgggggaagggacggcgggctggggggctcacgtgatggcgagcacacgtgacggcaagcacacgtgacggcaagcacacgtgaccaagagcagaggccacacgtgagccatgaacgggcaccgccctggacgtggcgaatgacgatctcatccgtccgatcctccttcggttcgatagacgatccgatactgtcaaagtgtatatcctagctcttcccttctggggctctgtttatattcaaggcacttgctcttcagctaatgtcaccctcagttactagtatctatattaagaacattggatagcacgacgtctagctaagcacttccgtttgtccttcgaaatcttaagttgataggcgcttcgatggccgttagatcagtcgttcgctttaatgcactagaccgagtagaggcaactctaggcttgctaacaagaggtcgggatgatttggacgtcgtatttgctttagaagacaacacatttggcgacaaagtggttgaggcagcgtttgatttcgatactgtatctacagatcgagtactagatcgggtagggagcacatgcgcatttttatgcattgacgtagtcgacaaaacaggtacctcaggtacctttggaggaacacttgtctggatggctcgggacgaagaagaagcatttgtctttgtcagtttacttcttgaagttgtagagttacgcgttgaagtagtaagttgaggtgaagacaatgtagtgacagaggcttttcgtctagaggcggcggagaccgttgtcggtttcaatggaggtattgtactttgccgagagtatggggcgaaacgagtggacctttcgttgggggcgaccaatgttggccgttgctgggttgcagaccgggtggttgattggattgaaggaaggtagcgcttgatatcaccgccctctagactcaactcaacctccatctcttcattcttcgcttccgtatgctccatcactttggtttttgtacgaaccactcctcctctctttctcttcccacttgatccctcgttcacttcatttaggaattgaccctccaatttctcttcgttatcttccttgagtaaactcgaatgaacttccttaatctcctcatcttctaaagtctctacgttctttcttcttgatcccggctcgaagtccttgaccaccttagttgtcctgcttctttttgaagcgttagcctcgtccttagatgataacgaaaacttaggtggagatatctgatgaagctcattctgaatgcgattgagtttagccttccgagccggggttttccggagtgttcgttgggcagggagtggcgcatgagctaagactggcaaggtcagcggagaagatgtcccgtcattggacaacgaagatggagcgttggggataaccgaactggagctttgttggaggcctgagggtgacaatgcccagaaatttgaagaaggagaagacggtactgaggggtgactcggagatatactaggaagatacgccgatgaaacattattcggcgcaggtatattcacagagatgtttttgttggtgtcatgaggtgagggtttgagcaaaagagagggatatataggcgcctggttgtgcgcaggagaagcataagtggcaggaggtagccgaggtatcgacatcaactttttagagtcgaaaacagactgtgaatttaacggagcaagcgtcaaggggttcgatggtgtttgaacatgaacccgcgttgaaggaggcgtggtttcaaggcgaatggatccttcggcgagccacttgtttttagtgattgatggacgggtcggtactgtgaactcgcctcttctctttcgaacgccaacagtttgattctgcccatcaaactggtttactcgtctggatagaggccgaaccatcccttgcatctcatggatacctcgaacaatctcgttcacttgattcttcccctcggcaattgataagcgttcctctggaggcgcattcgatggacgctgaccgtaagaagtagagcgcagagaagacagtaaatcgagaggcagaagagagaccatggcttctgtcaagacataaatgagagagaacaatagtccaaagggatgagagaactggtgtattgttggaaggattaaatttatgtaaatagcgtgtgttccctacagacatggtaaatgatggtaagcaacgatctacaagaggtcatactctagaaggtatagtgttaagctcacaatcgttctggacaggatcagatagatcataaaggcactcttggtctccgagtagaagggtaaaaggtagtagagcgtccggtcggtcaggccttcggcaaagatgaatgctgtctactcaagttcggcttatgtataagcacactcatccttcgatacacgatctccctatgtagctgattgaatagatctcacccaaacaatccatccctcaacgactaatctgacttctcgctttctgtccgcgttacttctccctggaactagctttctagcccttcttggcggtttgagagctttgtgagaagcatggacatttaaaaaccacctgcagatagtccaagtagagatgtttacgaaggaaagttgagcatttcttaagtggttctgcaagacaacacaaatgtatacaggtgaacttacaccccgtaccaaaggactgtgttgatcaaaaacatatgttatgtatcctccattcagaaagaaaaggcctactggtagatgatcgtgatgataattacaggaaaaaaacaatcccgatgaaggcaggaattaaacaaagccaacgcgtccttggtattcggttctaaccttcaagacactcacgcctaatttcttcatctttcgatacctatcgatcaacttgtcttcgctctgtaggccttcctacgcctattgtttagcatgatcaccgcccttcatactggttcgtcaactccaaaactctggctgatcgttgctcctagctatgactggaggttttggctctaaaactattcactcttcgttctccgcaacatcactagcatcctatgtggccgccatcgctgggttcctgttcatcaccttgagtcttggttagtctctggatacacccttgtccttgatttgctagtattagtagctgtgaacttttgttggggctgaagtgattagacacacgttctttcctggtgctgtagcaagtgggttattgtggatagccgaggtcatagaagaacacacgaagcttgccaaagtcgtcgggaggcggtcggtctacgtgagcttgcattgtttttgtcagataaattgttcttgtcactaaacccgttatgccttcaaatgaacggctgacacgctgataatcaggctatcatagcattccatctcatccttctggtggtcgacaagctgccggcactgctgatcttcttttccatcttctgccatctagtttatctggtttgttcgattttttcttccagtcttctttcggtacactactctatcctggcctcattctaactttggattctatctacctttgactcctccgtcgaactcttccagcaaaacttctccaaaacatggcctctgatttctctatcatcgccctcattcatagcgtcatgtctgctcgtgctcgtcgaccatttggtctggttctattacttctcagaacatgtcaagccggtaaatcaaggagggctcggagtaagtggcgggtaccatcgacctacgtactctaatacgtcaggtatgcgaggatacgggaaggaaggacttgggttcatggacgtagttaccttttttggtgggtgattcttcttacttgtttttttttttcgctgtccttccacttttgatactgatgttaccttctctgaatcaccttcacggtcgattgttgataggaatctgcgtatggtttatgcctctctatctattcttaagcttaagcgccaacgataacgcacttccttcattcggtgagtcatgatatacttcgccgctagttctctatctgtgtttaacgctaaactttctatcatatcttaggcacgtcgcaagcaccaacgacatcgcagaatgaccttcaatctggtcgatcgattggcaagacaatcctcaccccgttttctattctcttttccaccctctctctctctcgatctagctcgtcccggagcactgaaggtctgcttgcgccctcggcaccatcgggtccctacaccccctcagcaaatcagcaatctgtctactcgccatggggtgagcgagctccgacctcgcttccgtcttctccgatgagggcgcctatgtttaagtcacctccgcctcaaagcccaagtaggatgacgcctgggggatcgagctctctaattggcagaaacgctttccgggaagagttggaaaactcgaatgcgagaaatatcaacttactgagtttaacaccgccaaacgctcccaggagggctgttagtgatcatggggttttcaagtctgaatcttcccctcgaggagggttaggcacgactgctgaggtcagtcttgaaggaggtgcgattggaaggaaatcaggaaagggtgggaaggatgattgatcatacgagtgtagcagactcatgcctctctgtgttatcagcgtctcttcttgttccttctcccctctgtctctctcattgagaatttttgtgttgttctctaaaatacgataggccatgttctgatttgaagatgatcgacttacacaataaatataactagacggactatattatttatgatttatctaaggtgacttagccggttatttaccatagccggagcaggtttagaatataatcagtagtcagatcactggatatatatgcgcattcatcggaggttctgaccagctcctttgatcatcaccatcatcctacttatcattttcgggtcttccttagtctaaccatgcgaatagatcataaacaggacttgatcgaaaagcttcatctcgttcatgccaacccctcgttcgcgttcgaagacgtggcttctcgtctagaaatcatttccgcctttgtagagataccggaggaaaaagtgtcacaggatgaagatatcggacggaaaagtttagagctatgtgaggttgtctgtgggcttgaagttacatcaagtgagtcctgaagcttttggacgggtataaccactcctccgagtcgtacaaatttgaggactgattcaaatccattgggttgtttgaaacggggaatctcggaaacatccgatgggttataagaaatgtgcaattcgggtgcatctattcatggtggatgtatagcttttcttgtggacgtgtgagcctccgaatcatgattatctttgtacccagccgggtcattttgatactcgatcaatctgctggtgatattgacgaaacaatggattatgtggacgcaccttgaacagatgcacatccatgccgatgatgcttatcatgtcggatgatcgatgggcttggtctggagtgagcgcaaatctgaatgttattttccatgctggagcagtaaggactctctctttcccttcctcttcagaataattctgtgtctgaatcaagtcagtgagctcacacttgcatatatatatctgatttatctggcgctctctcacgtatgtgcctttcgtacaactagccagcgtaagacttgtccccgaccgtccaggagaggctagtggatacttaatgctgatgaactacatgtttgtgtggtgtggcaattaaaccacagtggaaccaaattgatcatcacctcgatcacgatgaatatcgggaaacgaatatcaaatctccgctgtgaggtatgtatcacatctttccatatctgatcgtcccttgcctttctctagcttataccttctcctctacggaaaactcacatctagatccgaaatgcagatactggacaactcgtcgcttcgggtactcacgccaaggttgacatctggtccaacaagggacagatgagaaaagtcgccaaacaaacggatgtcgagtcaaagctttgaaatatgtgctcgaaaaagagggaatcagcagttggcagcgagacggctgtaggtttgacttgtaaatcacaccagttgtaaaacgggaatgcttgtatatcattcaagcgtattttcccatagtgtgtgaccatcagctgttgtacaaaatatttgactatatacaatgtttcttgctttgaattatatccctctatcaccaacgagaaacaccatttacacatccacaattaaagagagagggacaccctcttcagtggccactcaaactgtgatgaacggctccttgtcctcctcactcaccaatacctcccagcccgctccatcctcagcctctagttcagcttccaacatagcttgaaggactttactcagataaggtctctcggtattggaatggccgcctgaattgcgaagagtcccagtgttggaagacgcgtgcccaaatttaaaataagaataaacccagattaaacagaatgagatgttgagagcaagacgggcatttcttggtctagatgataggggtgatgtacgaagattatggacttacacagaatgacggatgttcccttggcgttggcggccagtaaggaatgctatgatgtgattgatccaaggcgctattgaatcagctcaagactctattcgttctcgtagatgagacaaatattagcttacatgacccattcttaaacaacgataagaaagatgagtcgaattgttagcagaaacgagggccatcaagcttgataaacatcttataagagaagctaatgatgaactcactctccagtcagatataaatccgcctgaactttgttcaaaaccgactctccagacccagcgcacactgcaattttcttaataagctcgggtgcatcgggggattttgacagttgaactaaaagatatcgagggtgaagaagcaaagacagaacgatttaaatatagtcagtccatatgaactggcaacaaatcggaaaagtcgagattgatgacgaaccgaactctagatccagaagcttcttgacccgcttgacaacttcctcgatcgccagaccctcctcaagttcaatgatgcgaccaacgccagcatcttcaaatccggaaggtggggatccacacggcgagcagggtctcaaatcagcatggggctaacccaatacccaacgtagcgaagcgaagcgttaactctgtgctgatttgaacctgtgtgttgatctgttttttttagtgaagaaaaaggaaccaaagacctactttgaaaggagataccaaaaagtcgttcgttccgttcggaatggcatccaaagtcgtatgggcgctaaagacagatatcccagaagccgctagtcttagcaacgaggcttgaagcggattcgcgagtgtcaacgacctgatggtgaatagaaagaacgagtcacatacccaaagtatagaggaagatggcagattatggtcagaaacaagacggattttatacagagagacgaaaggcgacatgagctaaaggaaactaacttgagcccggagaaaataggggggtggtaggccagaacgagaccaacgtccttgtcgatcgcctctttgcaaacggccggagtaagatcgattgtcaggagaatctttttggagatccgagtaatatttggagcctctaacaaagcattggagcaacaaaagatgaaaacaaagaaagatcaatatcagcagaaagaacgaagcatgcatggaatgatgatctgagaggagggcaagacgaagcagaacgtcggacgaaccgatgaggagcccgacattgtcccacgagcccgctaacttgagtggagcgatccgagaccagatcttggagatgattgttgcaggcgtggagctcatacttctggttgatagatgtatgtatgtgtgtgtgagtgatcaatgatactaagaagcagaggtgatattgtgtaggaaagtcaaatagatgaacgccgagaatcatctacctctgacgtttcattttttcttgctagagaagccatacgtctcacaagtgatcttttcagctgaattcaaatccttcgtttcttgttccgtatactcattttgctgaattttcaacaagatgaaatagaggttaagaggaaggttctataatatacaaatatatgcagaaagagtacaacacgatccaaatctaccttgcaatccatggaagacaaagaatggtagtggtatcctacctcctccgtctttttttaacaggagtagggatctcctcttcatcctcttcctcttcctcttcctcctcttcgtcttcttcatcatcatcatcctcgtcttcttcttcttctggctcttcctcaggtccgctcagactgctatcgctactaggagctcgcttgtttcggttcaacgctgccttggctgaccggctaggcggggaaaccgagcttgcagagtgtacgcgacgttcatccatcaggggctgaaatgtcggaaatggaggaagatggaatgattccgtcggagaaggcacttgtggtggagtgttctgataatgagttttcagaaagacaaggcgcatgttgagcaaactttggacgcgtctgcagcatgattttatcgaccctagccaagatgatagaaagtgagaagagcagacgaacagcttcttgtagtctctctaaattccacatactgctaagcttattccaaagctcctcactcgtcacgccttcttcagctccatccatccccactaggcctctattgacagttgtcaaaaggcctaccatgtgaaagtttcggtctagacctaggggtctatgatgagtcaatgctcgaagaaacacctgcgagaaaagagaaggaagaagcgttcccaacagaaagtaacggtcaccatcagcaagagatgaacggatgggcaggatgcaagagaacaagaaacacacaagagaaacgatacgaacaagttcaccaggaacggtgtccaagatggaaggcggctggctcggttgaggcgaaggtgacggaacttcatccggtgtgaatattcgacggcttttccctttgagggacatgatgaaaagtcactcctgatatatacgtgcgtgtgtgtgtgagctggtggatagtcttcttgaattgttctaggatagtctacctttgaaggaccggaaggacgaagaaagtagggagttgagcggttacggtcaatcgaagggttacaatatagataagataatgaggcctaattcttctaccttacgtagatcttatcaattcaaaaatatcaaattcaaatcttcgtttctgtttgccttcctcttcgttaaactctctacactctcttctctatacactaccaaacttcatcatcatggacgacttcgtgctcaactttgctgcaccctcagcgtcctcaaaatcagctgctaaggcgccaaagcaaaaaggtggccgatggacagaccggtcagtcaaatctttccttccctttcctctcctttcattgaattcttgtacaccgttgcatttctattttgtactaattttttatgcttctatcgatacctactttaatttctagagtgaaagccaacaagaacaacggtcccaagaagagtaacaaaccttcctcagctggtccttcgtccagcttgggctttgataagcccatctctgccgcttccaccactgctgttgcttccaagcccgcacccgcacctgctcctcgtccagctaccacatcgacctacaaacctaatggtactctctccaaacaagccgctcctccatccaagcgaccgaagttcgactttaatgaggacgccggcgaagaatatgatgaggatgactatgaagacagagtggtctctaaggcaggcgccacaaagtcggcagaggctcctggaggagcaattaacccgaaacagatcatttcttctttgttcacttcaaaccccaaaagccattacgtcgaagaagattcggagatggattatcgacccaatcattcaagcttccaagaaccttctaatgcgcctcttgcctctaatccttcgacaaccacccagtcgacctctcttataccctcggcatctgcctccgcctcgttcctcgaccttggattatcccctcttttggctcaccatttatctgccaagatgtcgatcgagaacccgacgatgattcaacgcactgctcttccttccatgcttcaagcctcttcaacctcacccgcttctcttcaagacgtgttcatccaatcccaaacgggttcaggaaagacactgacgtatttgcttccaatcattcattctctcctcccgctttcctctcagagttatatcgaccgatctatcggtacgcttgctatcatcttggttcccactcgagaactcgctaaacagatctatgacgtccttgagggtctgctatcgatgaatctttcccttccgacggctgcttcctcggacgagaccggattggccacccccgtcgccgcacctcaacagaggctgacccgatggctgattcctggtcttcttacaggaggatccactcgaacccatgaaaaagcccgactccgaaaaggactgcccatcattgtttctacccccggtagattgttggatcacttgcaaaataccacatcactggacgtatcaaagcttcgatggctcgtactcgacgaggccgatcgattgatggatctcggctttgaggaaaccattaagggtatcctcaaatctctcgacggtcgacgaaagctcgcgttggagagtctcaaggatggaggccgaggaggtaccgttggtggatgggattgggatataagaagacgaaccgtgctttgttcggctacagtcagagaggacgtccaagcgctggcgggtgtggcacttgtgcggcccaaggtgttccgaggagtggcagaaaatccaaacaaattggtgtcggctgtcaagactgcttccaagaagaaggatgtcgaatcttccacggttaccaaggatggagaggaacacaccgaagcgcaggaagacgaggtggaagaagaggaagaggaaaagttcactcctccttctcaactgatgcaatctcatatcgtcgttcctcccaagttgagactcgtcactttggttgcacttctacgatcgttgtgctcccctaaaaaggaaatcaaggacgccaaaggacaggttgtcgggaagaaagtcatcgtctttctgagcacgactgactcagttgatttccactggaagatgttgggtgg

SEQ ID NO: 3185 - DNA, 9014 bp, Xanthophyllomyces dendrorhous
gggctggggggctcacgtgacgtatggaggatcgattcatgttgacttttgccatagtctttccttgtattcagactacaacatgaatcactacacatcatcatctacgatgcgacgtgaatttcttataggaaatatttattgaatcattatgtacaataccatcatagggacgaccctattaagaattcgtattcatacgcatacgtaagtccatagacaaagtacaatcagcacagccctggctctttttttctcccatcgatctcgcctcctcgtttcttgttccccggtgtcgtttcttgtacaccttcttctctctcttcatcatctggaacaacaaacacctttacgatatccatccatccattcatcctttccttctcgcctccactcaacttcaaatacagaatcaacaccatgagtgacaccgatggtacgcttcacgactcagtcaacctacctcgcctatgctgtctttctttttcgctctcgcttctctcttcactctcgtcgacctagaccgtctcgtctttgacgtgtctgccatctgaaagataatctccaagtgaggagaacaaatcagaagttgttcatccatctattctttgtccttcaaacggcaacaatcgctcccaagacagcctgcttgtcttacatttgtgttcacgacttgatcgagctccagctgatggtggtccagagagaatccatcttaatacacgcgtctcgtcatctatcaggcaccctctgatcgttttacctgctgtcaatgtgttggtttcttggtcaatggatgttcaacgattctgacacacaactgctctctatgtcaagaaagtcgacatgccgtttgctcaaccactccgactgctctctactttctctctccctgtgtatcctttcaaaatctcaatcttcgtccacttggccacctgaccgtcttttttccacaacgcttcgattcgtctcgtcctgacactcattcaccttatctctatctgtatcacgctcgccttgcttttattctttccttccaatcttccacccttttcatctgctctcttctatcgatcagaatgggcaacccgagatgagcctgccgctgctcaaccttcccacaaggacgactactcccggggtgggacccctcccccccgaggtagggacagacgaagtgcttcgccttccggagacaaccgaggtggaggaaggatggatgttgatcgacccgacagagggcggggtgatgggtaagctcttgtgtttgacatcctcttatttgctgaattttctcaagagttgactgtgtctactctttgtctcgttcttatctgcacattcgcttggctcatgaaggcctcctagatctggaggagatgagaaccctggaaacaatttgcatgtttcttcgctctcgccccgagtagaacaacgagacttagagactgctttcagcaagttcggtgtggttcgtgcttgtcatctttctctgctgaagcaatcagaattcttgagattgttctcaattgttaatctttcatacctcctgttatatgtcacctttgcggaaaacaatgaattttatatgggcgtctcttagattgataagattcaaatcatgtacgaccctcactctcgagagtcccgagggtttgctttcgtcacgatggccacccctgaggaggccgatgccgccatcgccggattagatggtgttgagttcatgggcaagcccatgaggattggcaaggtacgtatcgcgtatcgagttcttcttaccgctatgcttctacagatgagacgcatttagttaacttttcgtttaccgaacattggcacaaaggctcgacgaggacgagctcgaactcccacgcccggtcgatactttggacctcctaaggaagacgataggaggcccccccgaagggattacggttcccgagggggagagagggagagaccctatgacccccagccgtatgatgctcgatacagctgtatgttccatccttctcattgttttgacaatcggtgggacacagaatgtaaaagctgatgttcgccccgttcttctttactcaatcagctggtcctcctgtccgagctcgacctcctccctatgatgaccgacgaggtgatcgacgagacgaacgatgttcgtatctaaagtcttaccttgtctcagatttttttgatttatctattttcattcgtttgcttattctcgatttcttatttgatcttttatagacgatccccgaggaggttaccgatctgagagagactaccctcctcgagattatgctcctcgagactatcctcctcgagatccctacggctacccttcctccagggatagatacgaggaccgaccgtacgtgccttcttccactcgatcctccggaccctccggaggtggaggaggttactacagcgcaggacctgattatggtgcacctcctcctccaccggttcctagacgggacaggagacaagacgaactgtacgccacacctgctgctgggtatgaccgaagagatttgggagatagggatggcggtagaaggtggtagacccatcctttccttcgtctacctgctcgattgatcttttttgtcgtataggggctgtctttgctcttctcctactttctgttttacaaatccaaccattaaattcgttgtcttttctttctcctttcttcctccttttgagagataactttttcttttcgctccatggatggatgattgaaaaagattacggatgatgaacgctggcgttcgaaacgaaagccagtttacagatcgtcatacaacatatgaacaccttcataaaactatgaagcctttgcccatacctctccgaaacaggaacgagagagtgaattaaagaacgaaagacatgtcgtgaacaagagcaaaagatacgaactgtaacagatacggacgcaaagatcaagatgtatgataaattgatagatgtcaaaacaacgagaccctgaatgataagtgatagatattataatttcacgaagcagtagagctggacgaacggaacatgagcaaagatgtttggttttttccatgttgtgatgcttttcattctgttctggagggcgaaggtaagaagctgaagaaagaatgtacagaagggaaagaagattgaaaagacaaaggaaagagaaaagtaaattaaaaaggaaggctagaaggaagggcgcctatatgaacacgataagaaagcattcgttgctcaaaatatatatatactatcctagataatataaacaacaatatgaatcgagaagagaaaacacgtatgtccagatgaaaagagaacttgccaacaaaaaaaagacatgaaactacaaggtaggcacaagttgggaagcaaccattccaagaggaagacgtgagacctctgtttagaatgcagacccagctgcgaatgaccaaagccatttcgagtttattcagttggagagatggtctcgcaaagagatgaaaagagaagcgagagccaaagatagagaggcttacctccatcaagcatccaatccaggtctgaaagacccatgatctgagtcatcaaatcgccactacttgattttgtaacgaaacgatcaaaacaaagtattctagttcagtgcaactgtttttggtcgatatcggatctaacagaaagagaaaggaagaggagagaacatactcggtgtaaacgtcattttgaataggtaaaggcggctggaaggtcgcgcttgacgcactcgctatcggttgaccggagcagccattccctaagaacccgttgaaaccgtcttgatcggacatgaacggtccttccgtaacagagtcgaaaaagtgttggaacggttgactggtcgcaaaatttgatcccacaggtggaggtcgcattgcaaattgttgttgctgctgtagcaactgttgctgttggtaatgatgaagagggtgagatgaaggaagttggttttgaagatttggttgagtatacgatgatggaacctgataaggcggttgttgctgatactgctgggactgctgctgcacattctggccggtcaagaggtccatattcatcggtccaagtcgctgattcgacaatggtgatggcaaaatcggctgactgagcggatgataagctgcgaggcttgtagtactcctcaaatccgtcgtcgtcgggcgacgttcgtcctgctgagaatttatcgtagaaaatgtcatcagaggctggaggggtgatgcctgatgatcagtcgaagaaaagggcgctgttggtggcgaggtcgccgtcctcaccgctggcattgcccccgtggacgatgagggcgtcagtgcaatggttgatgaagcagaagatggagactgagccccggtgatccttgtagacgaaggtacagcattgttcttcaccaatcgacgaactgctcgttgaagcgcgtgggtatcgtctgagctcgagacagattctatgctacctcgacgactaggatcagctcctaattcttgcggatgtgagctgagcgcctcaagtaggagagcctcaatgacccgaatacttccccttgctggtgatgaatgtgtttcggatattctattgaagacgacgataccaaaaagcgagaggaataaaattagccaaagccgtgctttatctggatcaaaggataccaaaagatgacgcgtacttgaggaatcgcaaagcggcagaaacagactgaagagtctcctcccacttcgcgtctcttggcgtatttagcatgtcgattaggcagacgcaactcgcaaagaatgtttgaagcacgggaatcctagaaaagccgaaatgagtcaggtctgcttgtcccctcttcctctagcaaaatgagctttgaaactgatgaacgtaccaccatcggtttaagaaggaactcgtccgaccagaagccgttccagaattaatcaactccagagagatctgagccgccttgacacattgctcggtagaatatgcatattttttgttcttatcaaagccaatacaagagagactggtcgattagaactggggttgaacagagtgacgatgcggaaggaagggcatacagtgtatccacggctcaaatacggacgatggagtctttgttaaaaggtaaacccagagtaaacaataatgtgcatcagatttcagtatcaacttgatcaatttgctaagaggaacttgaggcgcacctcattcttctcgtctgcaaagataaatgcaacacaattttttcccaatgagccgcttcgggattagacacggagtccggagagattttcatgtcggggcccgtgtttacttgataaaacgaagggaactaaaaaagcaaaccgaatgcaacccgctctcacgccgttaacggaaagcattgatggaatcaggagaaaaacgacagtaccttgagagggatcttggctagctccccgtcgatagccatgatatcttcataaggtgggtgaaccgaagtattcatcagatagatcgtctgatacgctgtctggatggttcggagtcgagccagatggtatgacattggtgtatgaaccgacattggacgcggtcgaagaggttgaccgtcaaccagatcttcatcacaaatctacatttacaagaaagtcgaggatgcatgggaaaggaaaagtggaccttgaacctatgattacgacaaaagggcgacaacaaataaaggaaggaaggaacatacgttggccggaagcgcggtagacatttgttccggatgaatactacgagaaagaaagggaagacagaagtattgatttaagtttacgagggcatgtacagtcaagaaagagaggaacggaccttgtcgcatactgaattatgatcaatcagcaacccaaacccggatatttagatgtcaatagaaacgttagaacatgagggaatttccgttttggtcaagacgactcactccataagaaggagagattgaggcatctaagaagaccatctgccaccagatccgtctagcagtttctcgagtaataatcgactcccatcgacctgtccatttaagaggctgatcgcctggcttgagttcgccttgctccgcgcctaatctatttaaacccatcatttgagcgatcttcgggagattatcgtcaaggtagacgatcagcaacgattaacagttacagagaccagtatagactgcataaatactcaccttcacaccactacccaggataccccaatgagcgtcggcccgatcttgatttatctatttcagaccaattcaatcgaaagtattgagaaagatcagacacaaaaatgatgacagcacgtttgaataaatattaacatgaagctgacagaaggacaaaataacatacaaggtagactccacaaagcacgatgacttgaaggttctcgagcgaatgattcgccagaaagtcactttgccagagggaacctctagcaccggcgaaccacatggaaggcagaatttcttgatcttctttagagaaaccaagagattcggccttatcagagtccataaacgttagactcaactggaatgaggtgataacgtatgacaaaatgaaagagaggagattttagttgtgagctagcggaaaaggcatcagatctagataactccgaaactcacgaggagaagcatcaggaaaagcccaatccatgaaggcgcacacagcgcggctcgcttgtcatgcgggatgtcccagaactcgtggcactgccgaaggacagtgggcacgtctgtgtaattgctcgaaaactagattgtcggttgaagatacaataagatatgagctgatctagaaagcaagtactcacgaagacagtggtggaaccattctactttggcaaagtactatagacattatgagatcaaaaattgtcaataatattactcgatcaaaaacagagatatacaaatgaacagatccaacatacgtgttcaatgagcgcctcctctttctctcttccaggcaaacaagacatgaaagcctccatatggagcctagaaacaggatcgagtatgtcgaaatagagggttagtgtgttcagttttaggtttgattcattctgagcgcgtacgcttactctgatcgctggaagaaggtctcaaatatgagtgtcgggttccctcctttcttgcccaacagtacattcgcgatttcttgtcgttttctcatgtcctcctgcttcgcccgctcctcgtccgcttcatcgttttcgccatcttcttcattgtcttgttcgggatcatcctgatcaccctcatcctcgcgctgaccgcttaaatcagattgacgccttcgttgtctactcgatggagcgagtctgtctttgaatgttgggccaggcatcacgccgagcttattattctgaggtatcaccattgcacccaatgggccaccttttgatatcattggtggcttttgacccatagaggctttcgaaggcttgttgacaagcttgatggccatcgatggggaatcaacttttccagaatttggagtacttgaggcatgtccggttgcggctgagcctgaatgagtagtgatcggggcagaatcttgggtgaaattggagggtgaggacgtgagcacttggttaattgttgatgttgcagcagaaggtgtccggatgggagcagacacggagctcaaactcggctgggtcggctgagtggtcgaggatggttctgttgaatcaagaacggaaacctgggctgacaccgaagacctaccttcggcggcagtcgagcgaggagatttgagtgcggacgaagatgagttgcttccggtgaaatgtagattggtgacctgatctgaagataccggggcggcgacctgggtaggatcgtctctccgtctgccaaaggcaagatgttcgagtgtaagggcggcgccttctgtctctgaatcgattcctgcggttccttctcgactggttccctggccgtcgccctcgcctagatccatggtcgctcttcgtttttttttctgtcgaacctcggaaggaagccgtttaaagtcctcttcgtcttcactatcatcgtcttgctggtgactgctagcttggtcctgtcgatgttgttgtgttgatcgttcttcttcgtctaagtcgtcttcttcgatagcaaattcatcttcatcggcggcttcttcgctattttctggcttatgattactgtcacgacgggaccgaggtttggtgggaacgtcattttcggtccaagcgagtttttcttgaccaacctgagctcttttccttctaggccggtctcgttctaacctttgaacgagggcctcaagcgctatgacccgatgagtgagagctaggagatcgagctgagacgcgcaggccgctgattgaggtgcgtgtttctcgacctctctacaaaccgcagcatctcccctggcgatacatggttggcaagggaacttccggtcgcatttgatctttctgaagagagggagttttaaattgagcattatgattgaaatcaggacgcgtgtaggaacatgaacgggcaaggaaaaaacgagaagccaacagacatcagaaaggttcggaaatcaggatgacccgtttgcgttattcatccgacaggagagattcaagacacaagaaaagaacagagaacagaccttcttctgcactctgaacaactctggacagctcgtttctttcctttatcctttccgctcgtcgtggtctttcgatctttatcgtcctcgctctcctcctcttcgatctccctcctcgctctctttttggcgtattgatcgtcttgaagcgagctgcgtgcagcggtccgagccggtgctggtactgatgcagacgcagaagatgaactcatcgacagaggtgcgcccatcagagcattcaaaggaggcaacgtcgaggcggagaatatgggatgggaggtgcgactatcttgcgggaaggctggccgggagggatgagattggggg

SEQ ID NO: 3186 - DNA, 12161 bp, Xanthophyllomyces dendrorhous
gggaaagagattgagaatgcaagtgtggatgatgtggtggctgtggtggctgtggtggctgctgtggctgctgttgatgggagacatgttgagattggttgtgtggtgggtatggtatcggatggtaagaaggttgctgctgagggtctgggtgctgccgatgttgttgctgatacaggtggggttgctgacccggatgaggcggctgctgctgctggccatacatcctgtttccctcagtgaaagtcaagaactatgcgaagagaagatcagagagggagtgtgttaaagagcgaaaggaatgtgttctcagacagattctgtgaatgcttgttgggtttagaactcttagtcttccctaagaacgttgaacgatcgaatatcggtggatttggccgaaattagttttatcacgcaccaaccagaccagagactaccaatatatgcatggctctctcatcctgtttctttggtctctttcgtggttattacagttgcttgcttcccagctacggtcgtattcgcctccgttgagatgttgtccatataaggaaagaaagagaatatgtaaaaataaaacgttgtataaaggaagcatcatttcacacacatccacacaccctgctctttcacatatacacactctactctagttcgtccgatctgatgtcgacactagtaaacaaaaaaaatcaatcgtcagaaaaacgcccagaaggagatgacaggcagagaaagagatataaaagagtagacacaacccataacacaaacgttcgacggacacttacagatcacccgcgtaaaagttttggctaggttgccaaatcatgactatggttcagttcgggtttttgagtcgattagaaggaaggaaagttcagtcaattttttccatactttatgcttgatactgaacaaggaatctgaggaagaaaaaagagaacgctcaccgatattgtcctctgatgtactgctcaggccccactcgacgttcgggttccaactcagatcgctcggcttacttgtgtgaccaccatggacgaacaatagctctggcgggccatcgtccgcgtcttccggtgtctgttcatctccgatcttggagagatcccaaatattgacccgacgatcggaggacgaagacgcaaaaacagtttcgttatgaggcgaccaggccaactggatcacctcgtccgagtgggactcgaaagagtggagtttgacagataactttcggagatcccaaagaccgatcgtcttgtctccagaagccgtcaacaaaaggttagatgaactcgggctgaacgctaccgcgttgatctcggcctgatgggcctcaatctggtgtctcggcttgaccgagccgtcctctctagtgtcccagctggtgcgcgtgggtgtagttgaaggatcgatgttcaggttctacactctttctaacaaaagagtgacaagatagatacaagactccatactcacatcatcaactgtcgatcgtctccacaagaagcaaaaaggtaatcatgctcgttatgccacgcaacatcctggacagatcaagaattaaaatttgcacaaatattttctttagagtagacatcgaacacgagagtgacagaaattagagactcacctcaacgatagaagtatggcctcggtagactctgatgggatcgagcgagttgtttgttttcgaatatccattgatgtccctagaagaggcgcacatacacataccggttgtttagatagttagttcttcatttccgctgtccatcgtcaagcaagtgtctcgacactttcccacttaccaatggcaaacggtggtgtcctctgacgcgctgagcacgtgtccgctcttgacaggattccaacagagcccgtaaccttctttgctctgtccctttagtcggagatctggccggcttactccatcggcactggcctcgcttgaatgctttgtccggtcaaacacacagacatcccctgataccgtctttgtagccaacaagtttggattctggggcatgtaccgagcccggtttatctccccatcatggttgatcgtctgaatggccgtgactctggcggaaggtccagcgtgtgagcctaattctcctcgatcttcatcgtattcggccaatccggacgacagagacccggacgacgcgtttgggatctggacctgggcaataattagttggtcttgagcctggccagaggtatgcgtcccgagaagaagtcgatgcagagtatagtctgcgttgggaggcctagagacagaatgagtttcaataatattattttcattcccagcagggatgtatgtgttggatcaaggaaagtgtaagagaaggaacgtacgactcgacgtcgggaaaccattggcaggtgagcgatggccaggtcatcgcgtgggttaatacctggtcgtacaagaacggagtgttcttcttccaaatcttatactcctgttgaatgagtaagatggatagagaggacatgttcaacatcttccgcttaatgtctaagaccagaacagaaagatgcggtcccatggtgtccatctctctgtattcgcctctctttagttctatcctctacttgatctttcggggctctccacgttcatagacatgccctcttatttctcttgatcgcaagacaaaacggccgtcgcatctatccagacgagacactcatcccccttgcgtccaactttgtattgtacacgcttcggtcacacaaatgcacaacgtgcaataaaagctaggtgatgcagaaagcagacagaaggtaattcattcaaaagaaaagtttcgaaagggctccaaacgaacctcattgattacctggttctccccagaaggatcgacctcgtcatcgtccacctgaataggcgcaagggaagaagccatcgtgtggtatgtatgtatatgtgtcgtgggtgagggatagagtgatgttgatcgactcggacgcgccgttgttttttccctctattagtttttttctattagacaattgccagatttcttctaatcctaatctttccaacttttcacgaccttcatctcttttcacccaccttcaaccatcccataaccggttccatctttcctctttcgctctcctttcttctctctcacgtccaagcaacatggactcagacgaagatgatgccttcctatatggaacccctacagccgttgacacgatctcctcagctcaggttgcggcagatgccagctctaccgaaggaacgaccgtcggaatcacaacgtttaactctgagaacaccggagctggatacaaagggagcacagagacagccgaagaagacaatgaagaagaagaagaagaatacgaggaaggaagcgaaggggaggaagaggaagatagctctgatgatgtacgtcgccttttcctctcgtgtctcctctctggatacattctcatcggtcttcttacctcctcgtcctctgttcgacatatctgtttcatgtttatatcgacatgtgctcaatggcttcgttcgttttccatcctataggatttagagattatcatggatcctaccgctagtcggacattggatcttcgaaaagcgccttcaaaaatggtcaccttaggccacggtctgggggcttctaaggccgttcctcctgtcgctagaattcgttcgtcactcgctcttcatccatatttgtttaagatagtcttcctccgttaattcatgagcagacctcatactcatgactgttcacatcgcttccctgactgaaacgcaacaacagccggagactctctcactgattacacaccctcctcccgaccgaccgtgacatttgcacctctccctccaccttcgacacaatcgaccacgcttccgtcctccctgccttctcagagctcggctcaacctcaacagacggctcatctccagccccctctggcggctcctcagccgacgccgaacaacccgttcgcacacctacccccatatcttcagacacacatgaacgctcatctacctccttcacatacagcttcgacggacgtacctgtcgatctaaacgcccctccgttcttgccagatggaagaagtgtttatgaaattgacctcgaacagatggagagaaaggactggagggcacctggggcggacgtgagcgattggtttaattatgggtttgatgaatttacctgggggctctacgtccggcgcagacgggaaatgggggagatgattgagagtggaagcttgatggtaagaagtttctatacctctgtgcaattctcatctatgattctgagaaagacagcatcggaaagaacacagagcgtatgctaatgggttgatcatgtatctcaacgggctggtaccaatatcttgctgcaatgtagcagcagccccttttgccgacgttcaatcagcagcaacaacaacaattggagcagcagcagcagcaacagatgatgtcgatgatgggcggttttggcaatgggttccctgggatggacgccagtgggatgatgggcggaatgataggcggtggcatgattcctggaaacggaatgcccgccggtcctagaggtcagtatcttttcttttcttgttcttagagctcaagctctatatctgtggatttacagttcttcgtttaacctattatctctgtcgacgccaaaaaaacggggatgtgttgaattgcgtatatgcactctcagatctccaagcagaacaaggtttcatccccgaccaattcaacacccaaccagatcaacctcatcttcaaaatccgaacgtgatgcgtcatggagctcctaactccaccatcagcacccgaggcgcgtacgccgcctctcgcgggatgcgtggcagaggtggtgctcagtctaacggttctttccgcggtggaggaaatgtcggtcgaccaggaaatccaaatatcccgaccgctccttccggtgctggtgttagtctggctacaaaccctcatcagggaccaaataataacttgaatcctaacttgaatcagaacgtggcattcaattcgaacgtcgctccaccaacgggcccgactgggtcgtcaaacataccgactgctccttccggtactggaaacgtgacaaacgcaaacaccaatgtaaattcacccgctaggggactagcccatcggccggttggtccgtctggttcctcgactgtcaatatcccgaagggtccgagaaatgccggagggagaaaagatcttgatagagatcgaacagagaatgtggaaggattggactatggtgctattagtggaggagcgccagcgccggcaccgacggcaacaataccgacagcaacacccacagtgataacgacaacgacaggaggaacgacggacgacaacagtcctctaagcggcagtcgatccgaacgatcatcctccagccgtcgagaatcttcttcaaaggacaaagaccgggaacgagaccgagagagatccgatcgggatagagacagagatcgaaacgatcgggatcgatccgagagagatcgggacagagatagagatagacattcctcctcctcctctagacgcaggacggaagaagaaaagtcgaaggaaaagacaagtagctcgtcgagtagtagtggtcgatcttccaggcgaagtggagaccgagcttcaggttcaggttcgagttcgagggataagccatcaggaagctcgggcagacatcattcgtctaggaaccacagtcgggagagagattcgatcagagaggaaattacagaggatggtgcttccaacggaggagattccgtcaggttcgttcttttactctcttacccttccctctcgttcatccgtatcactcttcgcttggttctctttgtgatatcatattaactttttctcttttcttcttttctaaagcagcagtagaaagcgtcctgcatcacaagaaccagaaaacgagaacgactcatcatctcgaacctcaaaaaggcgttaaagaagactactttttcttttctttcctccttcttccccatctcaattgtatctatgatcgcgtctgttttggagaagggagcaaatctctgcaaatgattgattttaatgaacctcatgtcgacatgatttgtcttatgcacatacaaacacattctttctctgatcgcagtcgatagaccaagcatagcgacggagggtggaagaaataaactcattatgggacagaaatggacgaaggaaaagtaaagaatagagaatagagaaagagaataggtagatcaggatagactgtaatggcactcgatctttgtcagtctgatcaaatccgagcaccaccactgcttatatcgattaacgccgctcctacttcctgttcgtcaatcaacaaaccccccacaggatcacaacgttctacacccgacgtcatatccacatccatgtcctctctctctcccactccggcttcgtcttctacttctcgtcgatgttgctgatgatcaagctggtcggtcatctcaactggatgatcaaacgggttataatcttctcttctctctctatcctcatcgtcgtccttcttctcgccgctcttcatggttcgtccaaccccattcccgtcaccatccggcgggatcatggcgattgagatatcgttctcgggatggacatacgagccgcttggtgcatccgatggatgatcgacagattgagattgagacaacggttgggaatgatgacgtcgagaagggttggctgacgggtcggtagaagaaggcgttcggtctcgtttggcagggatctgaaattaggaggaaagtgatccgcaaaaagaaagaaaaggaattactttggaattcctttgtgaaacaatacatgtggagataagagcaaaagacgcactttgatggcctctaatgactcgggcacgctctcgcccaatcgcttcatccttgtcttgatatttcgcgcccgatctttcaacgccactctgttgtttgaatattcagaaaatgtcacattcaccgcctctatcaatattctctgtcttgtgtgggagagcttgtattcgagacacgaagggacaggaaccaaggggaaatgtatatgactcacgcatttcggttagagagaatttgggagaccgacccgttaggaccatgtcgatggattatcgaagcccatgggagcgtcttttcctccttgtattccttcatctcgttcagcagacattcatcttcctcggccgtccaacggatccttccagtctggtttcgtccggtaaagtacgtatagcctctcccttttcttgcttgcccctgtccttcgcttgaatccggattgacataaccttcagtttcaccttccatcgaagctcttgtcgttcgttttcttggttttttgacttttacttgagatgatgatgaagatggttcaggttgtgtttgagattgagggtacgcgtgatcaaccgtaggtgaacgtccgggtatctgctggtaagatggtatctgtttcgtgaataggcttaagcttagtcaggtacacgttatcgaatgtcaaaagtacacgaaagatggcaagaaaagaacgaacttgagactgaagaaggctaccgtctctttggccggctgtaaggtgacatctcatggtcagtcgatatttctactcacaacgaaataaagttagaaatcgtgggtgaagatccataagctaacccaaaataaaagccacgttctcaagtatctctctagccaccgctccttccttgtcttccgcgtcccagccgtcctttctctgagtatcctggccgttcaagtctgacgaaaattctgaaagtttttcttccgaaaccaagactagtcggtccgaaaggaggttgttctcttcttccgtccgacctagttctccttcctgttgatcttgttctccttcttcgtctgcatcctctcggtcaaactgtgtggatcgggtagaacttggcctattcttcgagtgctccatcatgattgaatcctcttcactctgattctcgccattttgaccaaagatgaaagtctcgtcccgcgaaagagctctgccctgataagaaggagatggcgtgcctgtcaggataggtgctgaaggttgggtttcattgaagttgaacttgtcgactggcctgtagaagagaatgagaagggtgtgatgagtggcagaaacaatggttacaacgatataaagaggtttgagaaaggcaaaaggaagacaagaaaacagagaaagagtggatacgcaaccgagtgaggaatggcttatagattgaattttgaaggaacgtttctaaacgagaattgagagcatccagcgggaacttatccccaagctcgtccggatgattgatcttttgtacatatgccggttatcaagtaggacattaatttgcgcgctttctcggatagatcgttaatcggacgtaccaagatatcaactctgtccgctacattatcctcccagataccacccatggtttttcgttcagcggtggagcggaaaatgccttcagccttagcatattggcctgacgaaggcggtgggtcgagtagcgcggtagaaaagaacgtttgaatgagatcttctccctccatcgtggtatcatctgggcgatggatggccgactgtcatcaccattcgttagtaaaaagcttccacagctacgtgaccatttctccccttgacttccgtttgttcggaaggaaggggagtaacagttttgattggaaacgaaagagacaaacctgggtacagatgtcaagaagcacatccaaccaatcgctcaacacctcttctctccatgccttttctcttctaccccttactaaagcgctctccacgccagccttttggttgacagatgggtccatcgacgcgtccatcgacataggtcggaggggacaaatcgaatgaaggaaatttgtcgatatggtctcgaaaggggacgcgtcggacagaggcagagacaggatgaggagagcgagggaggttggatgggccgtgcccggaaggaggggcggtaggggtacagagcggatatctatggagatagaggggccgattagttaggaaccattcccttattttataacaaaagatagaaaatagactgaaaaacaaaagggagagggacatactctccaacgcttgttgaccagctttcatgagttgctcgtctttgtgaaaccacccctcaaggatcatgctggttgggtcctggttatgtttaggctctgctggttctaccgattgggactggcgtgattcatctggctgatctgctattgagggatccacgctatcacccaacccgttttgtacgtgttgtttttcatcgtcatggtgagcttggtgagagcctgaagagccagatggagaaggaggggcaggaacggtgttcgaaagaggaactctcgcggtcgaacgggtcgacctagacgaaggaggagccgctgtgcgagccatggctgagacctgtctggactggatggcaatgagtgaagaactgaagggcagaagcgtaggaaagaccaaaagaacgatggatgtatggtttatggctcaagaaggaaacagtggattctgccctctcttgttctttcttactctcttgataagattacagagctgaaggaaacagtgaaggtgagaacgagggaaggcaggtagggttgagcgccacattgggaagaccacgtgagaaacagggtaaaacaatttggacagccatgacatccgattcaagcacagccacactgaaccccacgcgtaatcatctcactccgacacttatatccacctggaccgtatctcatccgtcgtcaaccatcattcactcaaacaagtacacactctcgctttcacattcacacacaaatacacacactataatgtctcaatcagccaaactggttctcttaggcaagtctttgtcatattacattatgaaaggagctattcagaagctccttagtctctctttctccttctctttctttattccccttggcagcaagctccacttgcagtatatcttttcattttccattcccaactcttctcatatccttccactgatctactgcatattaacgtctgtctaatatacaaacacaactctgagatattgaaattctttcgcttgctctgctgcttccttgcatgggcggggtccttatcttcataattgctacattgctgattcttcatccactcttgtattgattcatatgtcctcttgttaattctgttaatttcatcttgtataaccatacaggagaatccgccgttggaaagtcatccctcgtccttcgttttgtcagagatgagtttagtgattttcgagaaaggtatgttgtcttatatccttggcttctcatcgtctggctcgtgcttctacgacgaggccgatcgatgactagttaagaccgggcaaataaggcgcgtttcttccgataccacagaaacatttcaactaattagtatctctctcttttctcccctcttctcttctctcgcccagtaccattggaggtccgtcgttccttatcttgtagtgttcaccttccaacgagatctgccctttagttaacctcgatggacgttccttaaattatgttctcaacacatacccatcggtgcttaactactgccgctgcaacaaatcagccgctttcctcactcaaacacttacgttggaagagggcaaagtgatcaagtttgaaatttgggataccgccggacaggaacgtgagtagacaagacgctccggttcaagattatgaacgacttggtctcatagagcatgcgttaatctctgaaatgtcctctttactgttcttggttgaaatctgttcaggatataaggttcgttcatttttcggggtcggcgcactgcgagaaagaaagattctgacacaaattgttctctacagagtttggctccgatttactaccgaaacgcggctgcttcattgtatgtacattcttcagcacaagatctctcttttgtctaatatgcttactccgatgtcacaaattttagagtcgtatatgatgttacttcgccgattgaccagagttttgaggtatgctccttctgtcatgttgtttttgcaagccgacgaagatggtggtagaaaggtgcatgcccgattatctctagttctgacgacatcgccgctcttgggtatcaatctacattttgtttgcatcttcgctctcattcttgaaaccattttgatgggatgatcgccaacagaaagcaaaatcctggattcgagaccttcgtcgacaagccgacccatcactcgttatcttactctgcggaaacaagtcagatctcgaggccaaacgacaagtcccgaaagaggttggagagcgatatgctcaagaagagggtttggtatgttatttggtttgtttgtacgcaattgtgacggatgaagcccatctcatttacgtatcccttgtatgtttttattttattggacagctgtttgcggaagcaagcgccaagactggagataacgtcgagaatctttttagagagattggttagtcgtcttctttctccgtcttgaggtgttgttcgatatgcctgattcttcgcttcctgtcttacatgtataaacagccaagaacttgccagcaccacctcagcgagtcaaggcgggagggtcgggaggcgtaggaggcaacgctgcacgagctggagttgatttgaacgggaaagacggcgcgggagatagcgcttgttcttgctaaatacatcgactcgtctctttcttcttcacatatttgcctcttccactagatatccctaactcagcacgttcaattgggaaccttctgaattacatcctctcgtctttcactgtctctatgtctcaatgaggtggaatttcatttgttcctcttgtttctatcttcctcttctcatcagcagtgcggcttcagccgagatctgttttgtatcttttgacgtctcctctcatgctttatacactcttgcacttttcttggtcgttttatgtcttctccgctcatcgttctttacgctttcatcgttttatcatggctacttgattcgttgtcaatttcgtctcttttttt

SEQ ID NO: 3187 - DNA, 8433 bp, Xanthophyllomyces dendrorhous
tttttcttttttttttgggtatcgcagctcttcttctctgtcttgaatgaggtagtttaagctgagaatgtcgagtgtcgttgctgtttggactctggttagggttagatcaagctggtcatcaacacgtcagttgcaagttgcatcaaacgtcgaccgtctccgcatactctctccggatagcccttctggtgatgccggtactactcataccacttctcttcctctcagtgtaccttctctccaagagcattctggtcagataccgtcgaaaagtccttcgacagtctgccataaaccttcaaactctcctttcgtcaacctcctcgtcatcatcactcggttctggttcaagcatcaatggacacacggtcgttggtctcttccacccattctgtaatgcaggtggaggaggagaaagagtagtctggacggcggtagagtttatgcagagagttagtaagaaagagaaggaagaaggaaagcaaggaggtctacagattctgatctatactggtgactggcctggagttgcaaaggatgagattttagaccgggcaagggtaagcgaaatattcattctcgaggcaagactgataaatgagaagaagagaccattaaccctttctcttctctctttgttatctcatacgtattagtctaggttcaatatcagactcgacccagcgactgttcacttcgtacctattcggtccagagcgatgatcggcgattcttactggcctagacttactcttctcggtcaagcttggggttcgattatttgcgcttgggaaagtctagcaggtgatcgagggattgtgcctgatatcttcataggtttattcttttgttctctcttttcaagcgaaaataaagcgatcgttgactaagaaagaaggtttatgttctatctcaagatacaatgggcttcgcttttgctttcccagttgttcgtcttctgtcgggatccaagatacccataggcgcctacgtccactatccaacgattaggtcagtttcttattacttcatgccttgagaaactgtccatcaagatctgaccgaattaactcgattgaaacttcttgtttcctttgggggttaaagtactgacatgcttgaacgcgttcgaacccgtcaagcgacacacacaaacacccatgttgcatcttcctctatccgatcgaacttgaagctcatctactaccgctttttcgctctcctctacacatttgctcttgggcttgtcggtcctcaaggtgtgatctgggcaaactcgacttggacaaaagatcacttagtaaagcttttaggagaaggaaatgatgtaaagattctttatcctccttgtgagacgggcgcactgagtgcattggagcttgatcctgggggaaacggacagagggagagagtgatcctaagcctagcacaattcaggtacccaagcttttctacttcctcttccaaaaggttgatttgcagggggttttctgactctttgtatcgtctcttttttgtattgggacgaaaaaggccggagaaggatcatccgatgcagctacacgctctagcagaattgttcgctcgaaaacctaactggaaggagaaaggaaaagaccaagtcaagttggtgatggtgggcagtgttagggatgaaggtgatgagagaagggtgcagggcttgagagaattagctcaaaagttggatttacaggtagtgtgcctttttacatgttgttctaggtttcctcctgtctcgatttgaacagaattttcttgatttcaatcgaattacacgaaaaacgacaggacaacctggagatagtggtgaacgcgtcataccaagatctgttgggttggttaggaagatcttcagttggaatagcgacaatggtggatgaacatttcgggataaatgtcgtcgagtttatggttcgtcttttccctttttttactctgttttttgagcgtgtctttgtgcttactcgtctacacccaactgtgcgcgcacaacagtcagcaggtctgatacctctctctcatgcctcagctggtcctttactcgatatcatcataccctatcacgaccttcctaccggctaccacgcgaggtctgcatctgagtttggtgatcgtctcgtcgagattttcgaattatcgcagaccgaacaacgagatctaaggatacgcgctagagagagtgtcagacagaggtttgggagagaggcgtttgaggatggatggatggatggatgggagattcttaggcaggaactgaggaagaggcaaagagaagatgaacaagagaagagacaagagaaagggaaactagattgaatgacgatttgatccttaactcatttctgatgcttcgcgtgaaagaaatctcggactaaaaaccaccgctcgaaaaaaggaagaaggacacagtggacgtgctgtacaaggatacgacaagaaccattattgagacaaatggaggggagtcattgtaaggtgatatttcataatggtcttttgatgttcaaaataatcacagtccaatccctcctcccataccggtgatacccgtcgtatccctggcccttgcaacttcgctctccgtcatcctacttttcaaacccaagaggcaaccttcccagaacccttctgcgtcctgttccttttcgaattgacccaatccaaaggtgtgaagagcctgccagaaagccggatctgccaagcgctgtacgagtggtaaacaagggagagatcgaacgaatctggtcagtgagagaaatgatgatagaacaactccgttcgaatacaaggcacatacagcatggaaagaagcttctgcaggatggaggtcatgcgccgatgccgaaggttgcgtggtagttggcagaggaatcgctgtggatgaagtatctgtcgagattgtcaacgttggaatcgccgatttagccgtcgggtcgaccgggggctcctccgacttgatctcaccgctcgctgctgagctctgtgcggaggagtctcctccagggatccaacctgctttgatcatcaacaccaagctggctccatcgacgatatcatattctttcagcaacttcgaatctgccaaggcttttcctttgaggagaagccgttggtgagatggcggaggagcgtccggctgggcggccaattgtgatttcagagaagagatcgggtcggaaagtgaaacattggaaagatggtaaaccaaagcgggcttgagtgacttgacagtcaaagtgatggagtctgtcgttattggttcacaaaaggttggtcaatcatagcggcacaattcggtttggaaaggaagcaatttgatgaacaagacaaatccggcatgttgtagatgcagaacataaccttcctagctgaaacgaaagagtcgttcatcttgacgacatccaaccccgatccttttaattgcatctatgaccgtgatctttctttgcgttgaacacactccctttcccatacaatatatttctcatctcactcaacagagacacagagtcacggtgatgccttttcggaaagcgagaaagagaacacgacgataaggagcaaatgcgaagagtaggtccaacgaaccttgcgccggtttggaatctgaaggagcagcttctacagactttggtaactcggccacgtcgatagttacaagcggtgcctttctaggttttttctctgggggagtctgaaagtcatcagggagggcgatcggctgagaagcgatcgtgtcgatataggatcggataaattcgcgttgatctatggacatgatgtcaagtaaggccaagagaaaggagatggtgtagaaggaaggaaagagagagctagtggaggattggcaagatgatagacagcggatgacaaggggacttatataacatcaactcgaataatatataacagcacatgctaattttttcatccattcagttcctcatacccaactcgtccacaactcgtccacaacatcgatcgtatccagccaaatccagagagaacaaacactctctatttacgccatatatcctggaaattgaaacgcgacacgttttcgagcgctcgattgatgagaggagtgatgcgcgatgcgcatctcaaactgtgacactcttcttgtcagagcgtatgtatatacggaagagagcgcatatgattgaagaatccgctgatgagtctgcagattgaatctgacagattcctaaattcctagccagtccaatgtcttctgggcttgttcaggtttcccaggatggacatatactcaaagcggccttcagaggtttcgttttcagacttccgtcagctgagaaagacattacgcacatgcacacagtcaggacggaaacttctttgagtccttcctcctacgtctgctgtaggctaagaagagagatggtaaattctgacatatatatacctcatgataaccccggaagcaataacaaaacaatcaaaagaagcaatatacttggtacagaaacggagagaggagcgaattgggtagatatacagattgacgattatatgctcaagggcagacgactttcagatacatcaccatcctcatcttatccattctcgtccagtgaggtcacgcttgaagcactcgatgttattggcgtcttctctcgtcgagtcgatggagtcatcctgtcggacttttctagatctttctcgaacagagttcttgtcgagcttgagctggacaatctcggatctctatcttgttgagcgaacgttgaaggtggagactcggaggattgattcctgcggatgttccagcgccgatagagaaggtatccgattaatgctgaaagaacaaggcccgttatgatggttgagatgatcacggcgattagcaccgatcgcgataacccagaagaggtagtcccatttttgattgaagcatgagtgtgtgagctcgaagcaaccaagacggaagatgatgccctaggcattgggtagatagtggagaatggaaacggtcgaaaaggtgctctatcgaccagtgtggctgcaggaaaaagtctattcggacaaattcgatcagccaagaccgccttcgtaagagcagctggcaggatatgataattgaagattcaggagaggaagaagcacatacggtgacatgttgtttaccttcgttccaaccaacagaactgtcgaaaagtttgagtggactagggtaagtgagctgaaggacgaaactgaacattgggaaaggcttctgaaggttgatacttataatcgtttggttggtagacgagtgagaacctttcttaaaggtctgctgtccatctgtatacatacaccaagtcccggaaaggtctagatccatgcactcgagaagaggaacatgccgggtttgagattccaggagatacaataggcaaggcgaggcgggcgagaagagtgaggtacatgctttagtgcgacggcgtttcgggctagccaagcatagaaaatagagtgaacggacgcatattcaaacagaagataaccccatccgagactcagttttgtccttcttcctttgactgaccagacggaggtcttgagagttgtatgaatggtcgatccgatattcatgccagagaaggaaattcacgtgtgactatgtatcctgctcccttccctcgacttgtgaagccgagaaaatctagcagatacaacgacatacttgggcggccttgtttattatccactcgggagagggatctttatgattgccatttcatcaccaacagagatgtatacactccatgaaagtctttctcgccgtcagcccgataggttttagggaccgattagtatgaatgtatgttctgttcgtgatcggttagggatagaggtccttcggctgagggatgataagataacagcgtgaatcaaaagggttcacctcagatttacgtcatgagatgaagaacctttctcacctacaccgtccactttcccaacagatgtctctcaattggactcagatagatcattcttcactcaggccaatccctctgccgagtaagtccttcctagttgtcgggcttggtcagattgctcttgactccctgtatactgtgtctacagatgaaatactcttggaaagcttctctgggatagaccttgagctgaggcttccggtttcgctcatgggacctaaggttggttcagatcagtcttagtcttgtcagatggctggacgcttaactgtctttgggcctaataatctgtctagcgaaccactcgatcctctggacagatacatctctcaaatcaacgtgtaggacaacctcgacaatacttgagatgtggcaaagatgttcaccatactgatcaacgcctatcttctatcatcgtccaggtcatctttgtgtcatctacagcaggcttatcccctcctgatgctcctcctccttcgacatcatccgcttctgatactctcggatcaagctccagcccagtggtaaaacaaccttcgacagatgccgttgggttgcctatcttcttgaagagtggtgtagaatagtaagaaccgtctacttaggtttcgggcgatcgaaatgtctctgaatcaaaactgatgctcaaatttctgcctggccaatatttgattgacaaccaagtgtatcctccttcctgtctattcgtcagtcttcagacacctctgctgctgaccctcaaatatccacgatctctattcctcttgctcaactactcgatcgcaagttcaaccaaaatctttttgacagtaacacggtctacatttcatttcgtcctacctcagacggaggcttccccagttctcgacaaggtgtagaatcaatcgagatcactctagcattcaaagagggccgggtatgggagctatggaaggcattggaaacttgtttgaaacgcgcttatgccgatgaacttgagagaagaaggcagaggcaacacggggaaagcctgcgtgagcatcttctctttctacttgacccaactctcttcttttaatcttgcactttctaatgttttcacttctgatgtcactttctagccgcttatccaggttctatataactagctgtttctctctctctctctatatctttccatatatgcttcttcagaagaattgcatactgcacatgtatatatgtacaaaatatccaagctctaatttctctttctctttcctccgcccccacctccagctccgtccttcctctttgcgaacttttccaaagcgccgacatcggcgatctgataatctcccgtaccgacgacccccaacacacctccgctctttgtaagccgaccctgtcttctgacggcctcttgcattcgcttctccgcgtctcccttcccttcgtcgtcgtccctgtcccacttggagccagccggtcgaacagcagtcttcttcgcggcagacgaacccggcaaggatgaaggcgcatctctgagggcaaacgctttggcgagatgaccaaggtgaaggttcttcaagtggaagaaccgtttctcctcggacggatgggtcgagtatgatcgaacgtaagattggaatgctttttgagcaagcgtggcattctaagaaataattcgagaaagaagaaaaaagtgatggaacaagaagaaacctcagtttctaaactctgaacaaaaggaacccgaaagatatagaaagatttggatagaaccggaaagaacacgaaccttggtctcccctagaacccatcgttccatcgcgccctgaacctctgtagctcgattctcccagttctttccacctcccaacccaaccttgaccacaccctcgactccgacaggtttcactctgaccccgccacccatctttccttcgatccagggcacccaatcctcttctggcccgtttccaacgaaacaccatgcttcacctccttttcctactcgagctgttcgcccgactcgatggacgtactctgtgacacctccttctgtcggaagatcatactgaacgaccgcacggacgagcggaagatccaatcctcgagaagcgacagacgtacagaacaacaccgctgacgtaggcgaaggcgtggcgaacgatttcaatgaggccaatcgagtctgaagtgggagcgatccatgtaatcggtgaagtgttgtttgagggaggagtacagatgattgggtgattggttcggatttgatcgccaagtcttttttggatgtttttggcttttttgatttctttttggaagtcgtctttggttcagctatttctgactcggaggatgagactgcagcaacatcttcttcgtctttgccatcctcatccgagtcatcaccgtcttcgtcgcccgatctattctcttctccatcttcggtctccttcttgccacccattccaattccacccaacatcttccagtg

SEQ ID NO: 3188 - DNA, 414 bp, Xanthophyllomyces dendrorhous
tgttccctgttccctgttccctgttccctgttccctgttccctgttccctgttccctgttccctgttccctgttccctgttccctgttccctgttgtacacggctgcactctgtgctcgttccactctgttctggtcgtaccgttctgtcatgctatgtactctcataccgtgtgctctcatgtcgtgttctgtcgtgctatgttgtactctgtgtcacatcatggggtgcaccggtctgtcgggctgcatcgagtgcgctcgcatcgtgctctgttctgcgttgtcatctcgacaccgcctgtctctcgacaccgtcttctcgcacgactcggcccatcgctcatcgcccatctcggtcttccctcggcccatctcgacatgttcaccctcggcctgcttgctgtctctctcc

SEQ ID NO: 3189 - DNA, 367 bp, Xanthophyllomyces dendrorhous
cctccatcgcatttcctccatcgcatttcctctcccatcacactcacactcacactcacactcacactcccaaccacctcttaaccccatggccgaccgatcacgggcaatccggaaatccgaaatccatccaatccgatcggactcgcctgacgtcaacgcgaccgaacgggtcctcgacgtagaacaacacatcatgtctggtatcggcgccattccctccatggagggctcccacgtcactctcgagaagaacactctcatcgtcggtaagcaccgtccttgctttcctttcctttcctttccacattctattcttctcgtccccatcaataaaacacacaaacacacacgcacacacacacac

SEQ ID NO: 3190 - DNA, 3340 bp, Xanthophyllomyces dendrorhous
cccctccccccttctctccaacagaccttccccgctctcttcaagctctacaaacagggcctcctcccccccaagctccacatcgtcggttatgcccgaaccaagatgaaccccgaagagttccacgagagggaagtcagctacatcaagccgcccaaggaggaacaggaagtcgtacgttcacatctggttctttcatctcctaatctttatcctcacccgtccatcctttctgggtcttcccccccccccaaaaggccgaccacgacaagaagcttgaagagttccaaaagatctctacctacgtcgctggagcttacgacgaagactctggcttccaggccctcgagagccacctcaaggagatcgaggacggttatgagggtgacgaaaagaacagagtgttctacgtacgtctgctttctttcttcaactctctagcttggcccaaacttgacattcctctctgcttcctttctcttcaactcccccccccaaaaaacaaacaaacagatggccctccccccgtccgtgttcactacggtcgccaagggtctcaagaagaacaactactctgcctctggagtaaacagaatcatcatcgaaaagccgttcggcaaggacctcgagtcctgcagagaaatgatgcaggccctcaagaaagagtggacggaagacgagacattccgaatcgatcactacctcggaaaggagatggtcaagaacctgctcgtcatgcggtttggaaacgtctttttcgactcgagcttcaacaaaaactcgatcagcaacgtccagatcaccttcaaggaggatatcggtaccgaaggccgaggcggttactttgatgaggtccgtacaggcgtcttttttccattctattttcctttaccccttgtattcttcaacctattgccgtctttaaccgtgtaaccgaccgcgcgcaacggccgtacattctcttccccccactctagttcggaatcattcgagatatccagcagaaccgtgagctacctttctcaccttggtaaccttctcgtgatactccgtctgaacgacttgtccctattctgcctttccctctgcccatgcctccatcccgcctttaaacagatctcctccaggccctcagcgtgctcaccatggagcgacccgtctcgttctctgccgaggacatccgagacgaaaaggcatgtcctctttcctttgaccagttggcggttcatttaactaacatgtctgcctctctctctctctctctccctctcccctttcaaaaaaaaaccaaaaaaacaacccccctaattaggtcaaggtcctccgggccgttccccccatcaagaaggaggacgtcctactcggtcagtacgtcggcgccgacggcaagcccggctacctcgaggatgacaccgtgcccaagggttccaactgcccgaccttcgccgctaccgtgctctacatcaacaacccccgatgggagggtgtgcctttcatcatgaaggccggaaagggtacgtctcttcttttttctccactcactcacccgaccgaaacaaccatcctgctcggggctgacttattgatcccaacaaaaatagctctcaacgaggcaaaggtcgaaatccgaatccagtacaaggacgtcaccggtggaatctttgaaaacattccccgaaacgagcttgtgatgtgcgctcatctcttttcttggtcttgtcgcgctcgcaagactctgacacttattcgccctctggccacctgaatcttttctcaccctccttttttcttttttctttttcttgctctttttccatagacggatccagccctctgaggccatctacctcaagatgaacacaaaaacccctggattggctaccagggcgatgcctaccgagctcgacttgacctacaagcgaaggttctccgataccgccattcccgaggcctacgaggctctcatcctagacgccttcaagggtgatcactccaactgcaagtgttttcttctttttttgttttgttttgtttcctttttttaatcccacattgggcggactttttagcagagactgacttttgtcctcccctccttaaaatcacctccagtcgtccgagatgacgagctagataccgcttggaaggtatgtcgaatcatctctccgttggcatgtctcgggtcaaactgactttacgcgcgtccaacagatctttacccctatccttcattggatcgaaggcaagtccggcgaggcccccaagcccgagtcgtacccttacggttcccgaggacctgccaacatgtgagctccgcttaatgatctctccttgcccttgctgaaaaggacgctgaccaggggttcttctttcctttccaacagtgatgactttgcagagaagtacggcttcaagcgaagtaaccagggatagtacgttttgaatgtcctcttgaatttgacagtatcagtatttatttttggatttgccatactgatctggggtttcttgggcttttccgccgaatcctactcgttctctttagctcttggccgacgacgaacgtaagcgagttgaaacactgaacgcatcattctccctcttccctcttctccaatcttagagtcagttctgctgttctcccttgccttcttttgtccttttcattctttcctcgttggccttctcgagtctttttgtggttggctttccagagagaaagtgcgtttggctgaacaagtttctttttttctttcctcttcctctttcagatcgcccagctctcgcggttgtgaaaaaaccccatggcagcctttttctttctctcgtttgttttctctacatgtcttccgtagtttgctatttttcttcttcctttcatgtctcgtgtctggagtcctatgtcccttctcctcgcctactgccgtttctttcttttctttctctcacttctcttctttgccgcttgcgttcaagttgatgaaacatgtttcgatagtttcccctaaacagtcccctcccccttgccccttttctggcctttctgatcttcctttgacggtcatcggtcgatcgtctgcctggccgtccccgttcctcgtgctttgtcgttctctttctttttgttctttgtatgagatggaacgggttggtcggtcgttcggagaacacaggctgcgcatgaggatgaacggcggagagaagccggaagcgggcaagaggaaaaaagcaaggccggaaacgaaggccgaaggggaaaaaagaaaaaagaaaaaaagaaaaaagaaaaaaagagcaagaccagaaaaagaacggatgattaatggatgataacttttat

SEQ ID NO: 3191 - DNA, 14461 bp, Xanthophyllomyces dendrorhous
catcatcatccttgcccgagccctcactcgaacacgaaccggtttaccaggcccctctgaacttactggctgcgttcagatcatgggtcaagatggacgagccagaggccgagagaagcgagcagaggatcttgcgacgactgagtttctagtttggtcccttttcccgttttctctttctttccgctcttcctactttcttgctgttcgtgtctcaagactgatcgctcttccctcgttgtcgctgttgttgttgttgttttctcgtcttctcgtcttctttctctcagtcgactgccggatgagccggatcccgagtatccgtcgctcgtaggtcggtcttgcaagatcccaatctcggatgggacgtacatgaactgtctcgagatcacttccgtccgaccgccccggacgtcgacctcggaaggagcacatgaggaaggggaagaagaagaaggcgaggcaaacgtgttgatacacgggtacggcatgggactcggtttcttctactggaacatggaagagttcgcaaagatgagtgccgcgagaggacggagggcgtacgtgatcgacctgatggggttcggtcgaagctcaagacctcacccgaaagtgtttctcaagaccaaacgattgtccatcaaggagaaagtcgaccttgtgcgttccgtctcttgttgttgttgttgttgttgttgttgttgttgttgttgttgttgttgttgttgttgttgttgttgttgttatcttcttctttccttcgtgaggacgtacccatcaaagcaggggaacgaattggctgacctacctacctacgtgccctcctcttctctcctttacctcccccctccctctgcgcgcacaggcggaagactttttcctgaagccactcgaagaattcagagtgtccaaaaagatcaccgccatgcatatcaccgcccattcactcggcggctacctgtccgccgcgtatgcgcttcgatatcccaacctcgtcaaggcgctcgtcctgctctccccagccgggattccttctcttcccccatcacacggtccgtctggcgccagcgccagcgccgggaagacatcagcggacgacagtccggatggagcacagcacaacagggcgtccgggaaatcactcgccgacaccctcgccatggaggtcgggatcggcccaggcgagatcgagcccgggccgagggagaacagatcgagcagctgggacgtcggtcagaacacccatctcggtcactctggtatgttcctcacccgagactccaccgatcccacggcccaatctgacggagatcaagacccagaggacgatgaccacgacgacgacgacgaagaagaagaagaagaaggcgagaaaaaacagcagacgttcaaaggacccctgggaaagagtgggaagctgacgagcaagctgtatgcgtacatgtgggagtctggtctcagtccactgggtttcatcagaagggtcggtcctatcgggcctctcatgatcggcaaagtgagtgtctctccgccttttgctccatcgccgttcacgccaccacagagttgaccggaaaagagggtgcgctctcgctgctgcttcttctttcttcttacagtacgcctcacaccggttcgcatcgattgccccgtccgaggctgacgatctggcgtcatacctgacaaacatcacctgtctgcccggttcgggagagtacagcgtagggcttcttctccgaccgggcgcgttcgccaggtttcccttggtcgataggatcgcggggatcggcaagtcgatccccgtcacgttcgtctatggagagaaagactggagtgagtgtcgatctctttttctactctttcttcctttcgtttattgttttacgtagagctgatagtcgccctgctctcttttctcttggctctagtggaccgacacggaggcagggcagctgtcaaggtaagctagcctctttcatcttttccaatgttggttcgaagaaacaagctgatcttacttgcccccgtctccatcccttctctctctctctctttctctctttcacaaaaggctctccgcgcggttggcaacagacgttcccaagtggtgatctgtcctgaagcaggtcatcacgtatacatagacaacccagaattcatcaacagactcctttgggagaaactggccgggccgagctcatcagacatgccgagtccgatggtctcacctaccagttcggcgtttccctctaggagtcatactcgaccctcgtcgcctctctcaggtcaggtaactcaagacccgttggcgagcttaactaacggtggtggtggtagtagcagcagcaattacagtactagtttggatcaacgattcccgtcgagctcgtttgatctgggcccacacaccgagcatagactgtccgtctgtgtgaactgattgtctcttcctcttccttttatttattcttatttctcttatttgcaactttttttttcttctttttctttttcgggtctcgtctgtatctatatctcaagctgtacgcatctcatcaacttctcctttttcttttttcctcttgaaaagaaaggggctatatgtatatatttcaaaaccagttttttttttccttcttgcctcatgatctccttttattattttatttcatagaagtcattttctcttgcatctcctgtttgtatcggtacatatatatgttattctctctgcgtggccttttttttctctttcgttttgttttgtttttgcaatagacaaataaatccctctcctgatgatggaccgggaaaaaatcgccagagagagagagagtcaagagatggatagaaattagaagctcaagccggtcacgcgagggcttagatcatgtccgggtgaacggccggccggccgagtttggcgatctcgccctccgaggaaaacatcccccatcgacactgccttcttaaacgcttgctgtactctgaccagaccggttcttcctccatctcaccaagaaacggaaccgaaggaaaaagaaaaaagaaaagaaaagaagaacacgaagaagaagaagaagaagaaaaagacagcacaagcgattccctcttttgaaagaactagcgtctcctggacaagaagcgtgaacgaagaacaaattagacgaacacaccagaagagaacagagagaatcatggtcaagaatatctggctcgattgtgatcccggtatgtcgtccatctctccctccctctctctttctttatatgtatccatccgcgcctcaatctcgatcccaccggggttctcatcgtttctgttcttatgccttctttggaaaacgccgacccaaaggccacgatgacgccgtcgcccttctcctcgctctgaacttgtcagagatcaacttgctcggagtctcgagtgtcaacgggaactctggactcgaaaacacgaccaggaacgcagccaccttgcttgccatgttcaaagccagggaggacatgccgctggagagaggagcgaaagagcccattgcagggccagagttcaacgaaggagccggtaagacctttcgtccttcgcttctgtttcgtttcatttgactttggttgactcctctttgtgcatgtgtttgtgcgtatgtatgtctctccctgatttgatatcgatgctaacagccgaggctatccatggcagctctgggtacgtacaaatcatgggatcttgatgcaatctagagagcaactcctgaccggcgtgctctctttcattcataattgctgccagtctggacggcgtggaactcctgcccccactgtctgatcccagggttcaacacttttattccaaggcgcccgcagggaccgacacggccgttcaagggatggcccgggccatccgagattcgtggaaagacggacagggcgagaaagtctggatcgtcgtcaccgggccttgtacaaacgcggcgagactgatcaagatggaggaggacttggtcaaagatgctgttgccgggtgggtcgtcatgggtggttctttcggtgcgttcccttcctcttttctccttttttgggttcaccacgtcttgtgtcgttgagacctaccgtagctgaacccctccctcccccctttaaataaacgaaatatttatatatatgttacataaacccctccttggcctgatagatatccctcaatggacacccgtagcagagttcaatatccacaccgacccagctgctctgtccgagatccttcgacccgcgcctttcccgccggtcattctcgatcctctcaacatcactcatagcgcgatcttcacgtctgatatccaccaacgactgctggatccgaaaggcaagaacggatcggattggcggaagagaggggagagtgatgtgagatggatgttgagtaccctcctgacattctttgtcagtacagcgttccgttgatcttccctctcctttgctctcttgtatcatctgactgactaactctggttcgcggaaattttattggacgaactgactaggctgatacgtatctgaaagtgttcgacttcaaagacggtcccccgatacatgatgcactctgtgtggcctgggtacgtcccgcccatcctatcctatctcgtcctgtcccatgttagtttctgcacgctcactcaccgagagtaacaccattaactttttttaataaagctgggagacccgtcgctgttcaaaggaagatggtgtgatctcgaagttggctccatcgatgaaggatcggccggtagaggtcaaacccgactagtcaaaggaacggagtggaggaacggttcgtttgagcatggtgtcttaggaaattgtttcgttctagagacgctggatgtaagttacctttctctctttctttctctttcttccccgagaaggaaaaaaaagaaaaagggaaagacacactctgtgtagaattctttgtgaaacaccgaactaatcggtctcctcttccgcttgtcaacatggatctcaagacatccaccttctggaacatgttcttggaatgcgtagataaagtcgaaaaaaagattcaggcttgattggatcaggaatctggcctcatctctttattcgataggcggaagggtacaggatactctcccctcggacaaggggaaaagcgtggtcatccgagttctaaatccaatgtgttcggctacctttttgtacctgtatttatatatttatatccttctttctctctttctctggaagaaataggggaaaaacaggaactgcatgtatgttgtagatgattcagttcggaaaaggatgtgtggatttcaattgcactctgtcttgaagcaacttcgtgcaaagaagggaaagggtagccaagaattccatcccgttaaaggttacaacgccatgattggcacaagagacaaagactagagaacacagaaaacatagaagacaaataaaggaaagatcatcaaggacaaagctaattctcgactagatcgagacaaaaagatgagtaaaataggaaagaacaaggattgcccaaatttcttctcagagcaacgacttcatcttgtatcccttcgcatcggtgatattcgcctcggattcagcataagctctttggagctctgtcttaaagtgatctgcaacctgctgccgcttgaactatagagtgggacatcatgaagtagaagactcaaatcagtcagaatctcttaacatggacaaaggcaacaaaacggcgacggaccttgaagctaggagtcatcacatccggagggaaggggtcgttgctcagatggatacctttaaccatctcatatctgggtataatgaaaaagtgaataaagcagatgaagtctggtttcctaggattcatatgagccagtcttgaaacaagacacaacgaaccctttcaatcctttcgagcgggccaacttttctagagatttgatgatctcgttcttcaagtgtttggcatcctctccgtcttcctggatagccttagcgacatggtcagggtctttcagacgtcgaagtttggagtgagcagcgctttggataaactgtacggcttgttgaggatcttgttcgtttcattttatttattacgtggacgatcgattagaaagaatagatgagtacagccctctctcttgctcatgcggtgcgagatcgagataagagcaatttagttcgactaaccaaccacaccgactccgaccaagtggttcttgagaggatccccatggacatacatcgtcgtaaagaccggatgcaacgaatagacaccttccacactctccagagcaacatactctccctgagccaacttcatgatgttcttcttcctatcaatgatctattgtcaatgcaaatatatggacaagggcgatcagcacgagaacgcatatgtatcaagcaaattgatattcagactgaccttgaagcgaccggcctcatcaacaatacacacatcacctgagtacagatcaagcacaagtgtaaaatatcagtttgttgaactaaattggtttggatttgaaaaatcgcatatagacggaccagtatgcatccagcctgtaataaacacagaaacagatccatcaataacattcctcaaaacgaatatgcacacacagaagaagtgcctaccgtcttcgtcgattgtttccctagtgtttttctcgtctttataatatccactctgtatcaggaaaatgcatagacaacgacaagggcagaagcacacactaatgtaagcccaaactctttctcctatcaactagatttactcacaaacacgttcatccccttaacgcaaagctctcccctagggaagggcttatccttagcagagtagcccatctcagggatatcaactagcttaaattcgttgcagacactacattcacatggtttacatcagttcagatatttaagaagaaagcattcaaggccaacgaggttagactcactgaggcgggccaattttgccgcttgcatctttgtcatgagcgttacctataaaccatcgtagcatgccaatgagatttcatcaagttgatgaagagttgataggcttaatagaaggaacagccatacccttagacccagttcccacagtctcggtcattccccagccctccgaaaagttggcggcaaaggcgactttgagggtctcgaaaacatctttcgaaataggagcggaacctgtcgatatagtgagggctcagaatagattagcatggtacacacaacgagctatattcaaaccggtttgtcgtgctttaactcaccagaactcatgtaaagaatccttcctccgagtagctgagggagctgttatcagcacagatacaacgcggaacaagtatcgagagcgatatcagcagcgagaaagccgaaagacgcgcgtgaacgaaaaggagacacaccttagacaggaagagcttgtcataaacgggatgagtgaaatctcccgtctgatgatatctatccaatttggcattgagactcttggtaaggatggcgcctacatatgaccccatcatcagactggttaggaccaccagcatctgggactttggtttagaactttcgaaacgtgaatatacctttgattccaccaccattggcttgagcctgaaagattgatatgcggtagctttgatcagacccgaaatacatttctttatcagtttggaaaaacctagaagaacgaaccatgatggctgcatagattcggttcaacactctaggaacacttgggagaatgtggggcttaatgatctggatgtcctgcaaaagtcgaagagctacaaagcaaagtcaagccggcgaaggcataagtcaggtctagtttgaacaagattttgtgctaagacaacactcactgtctccagtactgtatgcagcagcacctcgaaggaggattgccatcagatccacgaatcttccatatacgtgcgacaagggaaggtaggaaatcaaaactattcctcgaccgggtaattccgttccataggtctgggctatgatggcagtggtcatatttcgatgggtcagaacgactcccttggggtttccggttgtgcccgatgtgtctatggtggtcaattcgaaacaatacagtgagtaaagtatcgaatgcagagaaggctgcataagaaaagatatagagtcacgcacagctaatggtagctatcgattcaggctttggaaccatggggtctaacaagttggctcgacccaggaccctcacttgagagacacatatacgaccgatatgttagccagatgaacaagttacaacgaagatcatggcagtacgtacatccatcgaaatcgtctacaaaaacaccctctcgccttccccattctttagccatctctccctcagaaccatacaggctctccatgcaaatcacagctttcaccgaaggaacgtcaggtagaagcttaagcattgaaggcagatgagctaaagagacgacgatgatggacaatccagcatgatttgatctgaaagtatgctcgaacatttcgcgcgtgtttagtaacgaggcttgaggtgcgagatatagagggtcagtatcactcacacatattctgatgaaggcagccattgagatgtgaccaggttgtgattgatatcagcaaagttaatcaaaagagccttaaatgaagtcataagcgaactaacgagtagcagtctaaattgttgaagttatcatcaacaatgatgaaagtagaacacgtcagaagagaggtgaaagagcgatgcagtcagtcgggcaaggaataaggagaacatagactgacaggtccaagggtatcgtatagaggtactccgacgagcgaaaaagcgtggcagcccatatcggtgatctgccactcaggtctgtttccactccagataccgacaccccatccaccttccggtccagaatgatggggatcgattcgttcaatcctgctttggtcgccaagaatacccgctcggaagagatgcatgaaagcagaaccaacctatgagacggaatcactcattcagtaaaagataccgatcaacttgatttgttgaagataggagagatagaaacctacctccatacgagccttctcaacttcaccatagctgatccattcgagcttgtcggcgtaagtcactggaagctgtcctcgaggagaggttataggtatgtatcccaacccattgtcgaatggaatttcatcggtcactagatcagaaacaacagttacaacatatagagttaacaatccgaatcaaacccgagtgtcaagagaacagaaccgaaacgtgccttgtttagtaacctcgtataaagtctggggtttaggcttctgaattaggacagactgatcagggtacagtcctataaacggccgaccattttaaaagagaagaattgttcgttaaacgaaatgcattagccaatccaaactctcaagcttggagacataaagatatccaagaagaccttacggtttcggtagtgtccggtttgaccctcctttctagttccaggtacctcctttgatgatccaatcgaagcccgaaatatatgcatgtgagatatattcatttaccgagacagaatgaatcgtcaatggaagaactcttcaatcagaagattataagaaatactgacaattgcctggctattgaaatcaataagagaagcatcatagactggatataacaaatgggaagggatcggattgatcggatggtgtttaaaaacttgatcggtatgaacttgagcagtcattgtaataacaaacgaagaagtagtcccaaatgagagatcgataggcgtgtaatctccttttaagaaagatatacaagagatataggttcaggattgggatgaagacgaaatgggatgaagatgaaagtggaaagggaaagaaaggaaacgttgatgaagagagaagacaaaggagagaccaaatggatgatgtgcaggtcacctggcccggaccgaaccgaaccggctttgtataaccgagcacgcggtttacgccgcttcggccgtctgacttgtatttatggtcgacaaccgatctagtctacattttctttaagaggtgtgtaagaatccgcatgcgtacgggtatatacacgtaaataactagtgatcgcctcagaaccacagaccggttcccgtcggccgttctatcggcaagtaagctatgctgatgtacagacgatctcaggtgttaaatgtcgctcgttcagagatactttcattcaacaacagcaatcatgaattgtctctagcgctagagctaatatcgagatatactttctcttgaggtctttcctccttctaaacacgagtatgagtacgtaattatgagagatgctgcaacaaattaaatatcaccatgttcagtcacttgtgtactcatattcagaaagtcatgttcaacgtaccttttagatactgattctcaaggttgcttgttaaatcaagacattttgttgatgatgaaaaatacatagaaagatgctgtatatacggacgatcttcttgctcagcgcaaccattttatttaaatcataacgaacaaagaggaactcacatggaagaactggccaaggtgagtacgtctacgaagaggctgcgtaggagtagaaacaggaaagggaggaataattatttactaatttagaagaacaggcctgctatcaggcgaacaatctctagcgcaactattaatcaaattcacaaagcgtcaccgaacggaagagcgaataggtcagcgaggaagaagaaaaagaaaaagaaacaaaaaaaaagaatattcagtgcgcgttgaggtataatctttgatgacaatgcttaatagatcaagtaagccaagttgacttacggcctccagccagcaaggcgacaaatcccaatgcaacgatctttgtccatttagcgtttgacgtggcagcctctttggctcgtcgttctgtagtagacttcttggcaggctgtcgctggccaaccttggcagcaaatttcttgagaacagtagagaaattgtatcgagattaagatttggtgagttcttgcatctagatcgaaagaaaaaagaacagtaagaaatatatcagatgctctacctcgtttttaagtcggatgtcagcagcggtaggctgtaataaggagtgtagatgcgaaacaagcaatccgaaaattttaacacacattcataaaccaaccgcactcaagcacagacctctgaggtagaaacttaccatgactgggacaaccaaataggagggagggcgaaaagaaagagctgaagcaggtgggagagtgtagggaaagtgagatggcccgatgaagataagtttgaatacttaatcaaattcaaaaagtctccaaacaacaaagatagtccgtccaatctcattcaacaccttcctctgcttctttctcaagataatctcgatagggaaagaatctttgacagctcgatactcctgaatccttacactcgatatctataaacctcgtttgatcatcaaacgatcatttcgaatttagaagctagcgttcttttcccaacttccgacagctatcacctatgctcagccttcctttccttcttcctctgctctcgaccgcgtccttgcttgtgaaagctcacggaggtggacacgcaggggagaactatgatagccacggcgcggacgatgaaagccttggatatgctgaaagacatgtttgttccttcatttctttatccttgttttcgctgtgtcttagagatcgaacgacgtccatatgcctagaaggagaagggcggaaggacatgggcatgttggacgagaaaaagtagcatttagctaattctacttttgctctatcaaatcatcaccagatgcgttccgagcatcatatgtaagcattctgcttgaacagtatatagctcataagatccgcttaccaattgtccttgtcttccaccccccaaagtgatgctttcgatcctgaagccttgtacgtataactttgagaattcatctcctcatggagcaggacccgcgtttgaccgatttttgacaatctaaaaacatttgtatcttccaaagcttcgcccttcatgatctcaaccatgacggagttttagataaagctgagatcgaggcgatctgtatgttctttcgaccatctcagtgttgtttctttcttttgtgtttcttttttctctctggcaacaagatgtatttccaatatgctgactgttctatttactccctcaatcatctccacactctatgttgccttaagacggacttcatcatgatatctccaaatctaactctgcctctgatgatactcactcagccatggccaaaacggtagttgacaaggtcctgagtatcatggatcgagacaacgatggtttcctgaccctcagcgagtttttggcggctggcgggagcataagtttgcccgacttcaaaggatttgaagagcttggtcaccactacgatgaagaaagcgaatagtatgtctcttctgtttctttctgtgttcctctgatgaactgtatggcgcaactcaacctgcatctctcctatcttttcaattttcctacatagcttcttgcaccacgaagagagatatcacaacactcctgagacacaaacggatgaagcatataaccacccggaagatgttggtcctttttcaagtctcttgtcgagccatcactctttcttccctttctcttcattctatctcacttaacactcaatctccttttcacacgggcccttctctttagatcgctcactttgagcaccacgaagccatcgagtctactgaggatgaccggattcaaaagtttgtcgagggagagactgagacccacagtgaccttccgcatgatgccaaggttgctgccgcaaacaatcgtgggagttcgccaggggcatcagctgcagttgagccgccgaagttgagtcgacaagaagaattaagaaacgagcggattttggcagagacagaggacgaaccgtatgggatgggtgataaaggatacgttcgaccccgaacacctagggacaagttaagacgaaacaccccttacaaggttcgttctcattctgtcgtccttcttctatatttctttccctgtgtcaagttgagtctgatcgaagtctactgataatgggtttgctaacctcattctggttttatggataaacagtacaagttccgacgaacccctaaagaattttaaaacaatttgcgaaccagcttgtcgatgtcaactgttttttgttcttagaaagcggctgctcaccaactcttctttccctgtccttcatcttccctctcactttcatcattgattgcatgcaatcttctcagttcatcattttcatctgtgactctcacttgatctttgtctattctttcaaaaacattcggccagaggttagatgttttgaccataaaaagaacatattccattcggttttctttttatccacctttatttctcattattttcctgtcatctttcatctcgtcacataggctcctatcaagtcgtttactggccctagttctcgcttctcactatattattcaataaatcgtattcttgtcccgcacgcaggtttatggcctccatcaagcgtcccaagatcggagtctatccactctattatcaacaaacgggaagaaatctgagccgagactcttttatgtctcggagacgcggaagaaccaaaaagatactccgaactgacaccactgaatatttcaacatactgcggtgaaaaaaacgcatgtaaatagacttcagctaaacaagagtgagctttcaaagaaatcgagatgatctgaggaaagatgagaatgtgccacttgatgaaaccaggagcatattaaaaaacatatatggataacgatggcaaaagaggtacagtatacaaaaacccgtcctgtgcacacgcgctggtgcgttgcttagaggacggagaacagctacccggcacagcggccagcagcagtgaaggagccgggacaaactgagaataaagcatgacgagacaaagcgaggcagacagaggggcctagacgacaccaacgacgacggcagccgtctatgcgcgctctcctcgcagccgccgggcaagctgcaggtccttcggctggatcgtcactcgcttcgcgtggatcgccgccaggttcgtgtcctcgaagagcgacaccaggtacgcctcggacgcctcctggagggccatgacggccgacgactggaagcggaggtcggtcttgaagtcctgggcgatctctcggacgagccgctggaaggggagcttccggatgaggagctcggtcgacttttggtaccgccggatctctcgaagggcgaccgtaccgggtctgtcggggga

SEQ ID NO: 3192 - DNA, 1260 bp, Xanthophyllomyces dendrorhous
tcaaaccgagcgagaccgacaaggactactacctcgaggccatcacctctgccgtgaacgccatgatcgccgtcgtctacgagaaaaaggttggctcctttcctctcttgcccgcctttttcttcttctctgcctcttccttctccctgtccttcccaagccgaccttgaccaattctttatcttttctcactcctccgtccacagggtctgcctgccgccgccgctttcgtcaacgctcactttatctcccgaagcgtcgacattggctcgttcctcaagtttgccaacccaaaggccgtcctctcggatatcgtcgtaaagtacggcctggagccgcccgtcgccaggtcaatcatccataagttttcttctttcacttagctctctgcgcctttttgctcatatcatagccccgaatatcttgcttcctctccctcatcccaatagactcatcaaagagaccggtcgaatgagtcagacaccatactttgtcatagccatgtactctggcaagatcaagcttggtgagggttggggaacgagtctaaagatggccgaacatcgggtgagaattagtttctttccttcctccctttctgtctactcttcctttttcttccctcccccccttagagaaaccaaaactaacctctttgcctcctaccattcgcctttcgcctcgtctctctctctctctctctccctccccgtcattcttctgcaggcctccacaaatgccatcaaggccacctacctcacagagaccccaaacccggtggtatccatcgccgggttctcgccatacccactgacggacgaaccgttggcttcgatcgaacaaaagtacgcgttcgtggcgcctgccatcggtgaatccgaatcggtctactcttccgccttgaggccgccgagaaggtaccgggctagcgatcatgtccaacccggaatggagcacgtcgtccgaccgaaagcgatcgaagagggcaaggagatcacccaggccgagaggctgaagaggttgcagtatcagaaagaacgacaggtcaactgggaaaaggcagtcggtgacaccaaagaccaccatcgcaaactcgaacaaaagctgaaggaggtcaacgagatggtcgtcagatcctccaggccttgaactaaatataagaaaagatatgcatgaaactcttgggttctcgttcgctcgctcgccgtttattcttgctttttctttcttctcttttcttttcttttcgttttttttttt

SEQ ID NO: 3193 - DNA, 2753 bp, Xanthophyllomyces dendrorhous
ttttttcttcttttttttctcgtcattttgaacatcaacctgacaagagcgacgtggcagctcaagcatcttgtatatcttctatacaacaagggaaagaaaaaaaaaagaaaaacatacaagcaaggacaaaagaatctccgcttgtgagagcgcacaaaaagacggacggcccggctactctgatctgcaacgcttctaaccctaacaaaacattcacccgtccatcatcaacaccatcaccatcatcatcaacatcagtaccaccgtccattcgtcgtcctgtttgtcattctgtcagtccattgagagaacatctctctgtctgcctaccgaacgacttgactcgagacacgcccgatcacatcacacatggaggtcggtcttgtacgcattcatacgcgctctctctctcttgcccttggtcatcgaagggatcatcagaggcgaacgtttcacagtcgtctgatggcatatcctccatagcatatccagttccccttcttcgctttgatctccgagtcctgattccaagactgacttttgaaatcttccttccgacgaatatccaataggacctgttctccagattcctccgccggccgacggcgagcagagagaccgggagatcgaaagcgaaagggaaaggaaaggacgaagaaggcggagggggggacgaacctatcgtcgggttctctaatgcctgggaggatataaaggttcgttctttctggatctgttcttgttttctttcatcgttgctattcctactgtcgctgccactgccgccgccgctcccagctggcttccggacatatggcatactcacccgttcgagccgccttgactgactgattgatcatgcccgggaataaacaggaggtgctagaacacccggacgaaagagctctctccagagggatccaatcgacagtcgtccctagaagaatacagtatatgatcgatgccctcgtttccgaatccaaccagacggatgaccagtccgttcgcctttcattctttttcctcttcttctcctctctctctctctctctctcttgaatttacgtggccctagccgaagctaaacgatcgatcggtaaccctcctcctgatatccaaacagaacaacgggcgcctgcttggaatacctactcaaacacgacgtgctctccaccctcgaacggctcgcaggctcggacgaaccggagggcatcaaagcagaggtcttgatcggattcaatctcttggtcgccttgctcgatgaaaactttttggttcacaatgctgttcgttgaccctctttttttcttttctttttttctttctttagttttctctttcttgtcttgttcgatgttttctcgctcggtatatagctgacaaccaggtcctccttccccccccctctctctctctttctatcttcctcctttccttgctctatccttgacacgcaaggtccatcgaccgttgagaagacttttgagaagctgcgtgggggacgaaccggaagagattcatctggacggtcaggccaaacctatgggtgctgctgctagtgggagcgcgcagaaaggctcgctcgtaaattacgaaaaggatcgtcagtccccctcttgttctttcttggctttcttcttttcgaaccgtgacaaagtgcttgttgagccatcagagatactgatcgtgtgccaggaggttttgggttatctcgttttatcttctctctccctcggttcatttgcggaaaaaaatagtcttggagttgatgtgagtgtttttgtttgcttgtttgcttatttgcttggttgctgggtttccctcctccactatcgaggcgagttgctgatggcaagaggttcatacatctctctaaaggtgcatgctgtgtaaacggatccgatcctaccccgctcttctcatgatatttttccacgacaaatccctcaacgcccaccgtccgtcgaccgtcacccagaaacttccgactggatccccagaagacctctcgtcccgcgcgacgtctccctcaccttccaacacgctgaccgccccttcatcagaccacccggcatcggtctctcaaccgagcgaacgaaagaaggaacccgagttcctcctgtttgcatatctcctccggttcgtccatcgggagagcccgatcggcgagtttgcccgtgccggcctgatgttcctcctcgacatcgcgttctcaccctccgcttcgctctcaccttccccttcgaacccgtcatcggcaccggaagatcaactcagctcgtccgacccgttggaggatataaagtgctcgatggcagagtacatgctccaaggcgatttcccagaggtcctcggcgctggtctcggcgcggtgtactctctcttgccaaacaagttggcgatccgaccggagcttgggtcggacgcctcgaatggtacaggcggagggatgatcctcggaaggtcgacggatcatggggaacccggcgaggacgatgaattcgatgacggagagcggcaaggtcaaaccggacggtcgatggcggcgatgatcgagggcgaggattcgaccagtccagagttcaaagatcgactcgatctgttcctcaaatcgtgcgagtttatctcggacgtcatcaaccgtgcatccttccttccttctgttcaaccgtcgtcttcgttgtcatcatcatcatcatcatcttcatcttcatcttcatcagcagcagcatcaacaaacccgccgctgg

SEQ ID NO: 3194 - DNA, 2955 bp, Xanthophyllomyces dendrorhous
acccatcgatcctcgaatgctcagatcaagacggttcggccgtagcggtcatcgcgtacatcgacatcatcctctcctcgttggatccggagagcgcactctgtcagatgttcctcggattcctcataggatcggacgagctcgagttcgaagacggggacggccggtcgggatggacgggcaagctcggttcagacatcggtctcatcccgagatccatgggcgggctcaaggaggaccgcggcgagcgggagacgaccaaagtcgacagacggaagagtagcgcgatgatcctgttggaaaacatgcaggtccctcggtcggcggggaaccaacagtactttacctcccagggacaaggaagattcacgctcaaagatctgatcgtcgacaacatcgcttcttcaaacccgcccacggcgagtgctacgctcaggttgttgaacacgatcttgacgagatatccgaacgtggcgctccatgggttgttggacgtcttgccggactatcggtcgaccgtcgttccgttcgctctccctccgctgtcgttcgacatagacgacgacgacgacgatgatgttgtcgatttcgatatggttgcagatgatctctctcacggcgatggtaacagcgacgatggagacgaatcccataaatccgatctcggtatttcgcggctgaatcttccgacggacgatgtattcggtcaacctggattctcctcatcgaatcctacaccgtctctaccggaatctagcaaggaccgatgtccgtccttcctcgactggcctgttcctaaacgtctgatggccgccgctttcgatcacacccgagaagtcgagctttacctgtcgctcgtggcagatatagatcattcctaccagtcagcacacacgcccgttccatcgacgtatgagaactatctgcaggacgccatgttggcgatcggttccgatcgctcgctcacgaatttccagctaggccttctctctttctcgacagaacagcatccacccccgctctcgtcgtcttctccacatccacacccgcgttcctcgtccggagacgttccagctctcgcccgtaactcgaaactcaacccgtcggatccgttgcttcagctcgtcctggaccgtctgagagagttcttcatacacaccccagaggagaacctggcgctgacgggtgtgctggcttcgatcgggctgaacacgaacctttgtctggaaggatggttggtcttcccatcggacgacgaggtcgatccgtgggctgcgctcgaccgaaagatgaaagtaaagaccgagcgagctgggtccaagtccgtccgtccacaaggagacgacggtgagggtgagggggactctacgactctacgcgagaccgtcgttcggtcgggtgtcacagatgatccgttcgtcgagtccgactcgttcgacactcagccgatcttgtatgtgctgttcaaagatctggtaagcttctggttttgtttctattctttgttcgttcgtttgtgagagctcgagtgtgctcactcttactctctttttttttttctttctttttttttctccttttctctctcttcttttctcatttctattctttatttctacttggaaaaacaaaggttcggaagctcgaaagatatcggctcatggaacccaagttcgatgtctacctctctgagcgtcgtcaaggactctttttcgaagagaccatgaccgacattctgatggacgtttccgaacctagctggttcggcagcagcaacagcagcagtgctttgaccgcagcggctactcctaatgacttttcatctcccgcgagacccagtccgttctctcgaccacaagctccacagagactgatgtcgtcccctcgagcgggtggtaacgctggcggcggtggcggcggcggccctacgctacccactctgagatccaacgtttcctcaccggcaacccctcaagcgaaaaaaaccggatggtctctgttctcacctctcaaacggacacctgtccagacccctccggccgtctccggtgccgccaagccgttcccgtatgtgcctcgagtgatgcccgacggtgggggcgcaagtccgaggacgaacagacctgggccgtcaacgccttatgcggatcattactcggcgacgataggtcgcaaggtagagagtctcgtggctgacagtccaaagagaggggaatggagcccggctcgggtgaaacatcctaaaccgttcaaaccggcaaaaagacggatagggcccgtccatacgaacgacgtgagcgaggagtgtgcgtccgatgacggtaaccttggcgatggcgatggtgaggaggacaacaaggtgcaatcggtggatggaaagagagcagatcaaacggtccaggtgacgaccactcaagtctcgctctctcaagttctcgataacgtggtggtacgtcctgatctgtttctcctatccctttggctcttagactttggcgcgagcgacaactatacctatactaaccgtacggtcttcttactctttcccgcttggtcgatgcctcgagcagatcctcgaggaatgtctgaaagagctggtcgcgatccgtgtagctcgtttatcccagggagctgatacccttgtcagaacgtgacccgtctgtcatatagatttgatgtgatcctttatatccatgtgctcaagatttctttcttcctgctcttgcgctcattatggatcgattcaagtcacagaacatgaagaatgaaacaagtgatatcacatatatacatatacatatatttatttagaaaccaagtacgaaatacaataactcgtctcacgagcggagaacaaagcacgacgagacaaagcgaggcagacagaggggcctagacgacaccaacgacgacggcagccgtctatgcgcgctctcctcgcagccgccgggcaag

SEQ ID NO: 3195 - DNA, 453 bp, Xanthophyllomyces dendrorhous
acgcgaggcaacgcgaggcgagacgaggcgaggcgacgcgtctgggcaggctacgtcatcggtcggacgcgtccagggcaggcaccgtccagggcaggcgcgtccggcggagacgagccccagacgaacgcgctccgggccgacgcgtgtgagcaagtcgcgtcgtggcttttcgcctcgcccgcctcgcctgcctcttcggcctcttccggcttgctctgttcgccgtgtccatgctctgagcggtataagaagacaccgagtctggggtggcagcgttctttccttctctctatcaccatcaagcacatcaccaacgcccactctccaccactcactctccaccacctactctccaccacctactctccaccacctactctctacttcccagccacccccaccaccacacacacaagcagacatgtccggacgaggaaaaggaggaaaggt

SEQ ID NO: 3196 - DNA, 913 bp, Xanthophyllomyces dendrorhous
ctcgcgctccctcgctttcttccccgctctctcgctctctccctcgctctcttctctttcccgctctctcttccgccttgtgtgatgcgctcagcagactgacgccgttgtctggccgtctgacgtacagggactcggaaagggcggcgccaagcgacaccgcaagatcctccgtgacaacatccaggggatcaccaagccggcgatccgacgacttgcccgacgaggaggagtcaagcggatctctgggctcatctacgaggagacccggggtgtgctcaagctgttccttgagagtgagtggtcttgttctctttttcttggtctgctggtcgtcgctgttgttgttgctgttgccgtcgtggctgctgttgctgttgctgctgctagtagtactgctgatgctgactacccctcgatctgttgcctcatccttgcctcatccttgccagatgtcatccgagactcggtcacctacaccgagcactcgaagcgaaagacggtgacagcactggacgtggtgtacgcactcaagcgacagggccgaacgctgtatggctttggcaactagacggacagagcagagcagggcagagcagggcagagaagagcagagcagggcagagaagagcagagcagggcagagaagagcagagcagggcagagaagagcagagcagggcagaggatagatggacagagcagagtcgtctgtggactgggctgagctgagctgggctgagctgggctgagctgggctgagctgggctgagctgggctgagctgggctgagctgagctgggctgagctgggctgagctgagctgggctgagctggactggactgtatatactgtaacacaccctgtactagatatgatgtatactctatcgcgctgaccgcttggggacacc

SEQ ID NO: 3197 - DNA, 419 bp, Xanthophyllomyces dendrorhous
ggagagagacagcaagcaggccgagggtgaacatgtcgagatgggccgagggaagaccgagatgggcgatgagcgatgggccgagtcgtgcgagaagacggtgtcgagagacaggcggtgtcgagatgacaacgcagaacagagcacgatgcgagcgcactcgatgcagcccgacagaccggtgcaccccatgatgtgacacagagtacaacatagcacgacagaacacgacatgagagcacacggtatgagagtacatagcatgacagaacggtacgaccagaacagagtggaacgagcacagagtgcagccgtgtacaacagggaacagggaacagggaacagggaacagggaacagggaacaaaggaaaaatgacacgggcacagaaaaaagggaacagcaagcagcaagcagcaa

SEQ ID NO: 3198 - DNA, 39844 bp, Xanthophyllomyces dendrorhous
gccatgaacgggcaccgccctggacgtggcgaatgacgatctcatccgtccgatcctccttcggttcgatagacgacctacaagactctctactatcaacattatgagctttcccccatcgtccgatggcttccccagaagattcgctgaatcctcaatcgatgcaatgactccggatgaagccattcgaagtacagatggcgatgccgctctctctagactgtaagcttttcatcgttccatgcttcgttgatgtgcatacacaagcacatcatctaactcttgtttcgtatcggataatcttacttaagatctgcagtgagccagggatatttagaggatccttttgcttcattcttcgttcgtggtagacccacaaaatcacaatatctccggccgccgcttataaacatcggcactcacgcgcggaccttaggtattgatgagctcgtccgaagtttcttatccgggccggctcaagggggcggccagattattagcctaggagctggaagcgacactagattctggagacttcaggttcggaccgatactctcgctaatactgactactcaggcgacatcaaatcctaaatagcgcaatctctacttaaacagtccgatccagtacttaagtcatctattcacaagtatatcgaactcgactttccagaaatcacccgccagaaggcaggcttcataagaaaatccaaggctctgtctgacccccttggtccaatagaatcgatcaaactcagttagcatgtttttatatctgcctccctcaagcatgttctttagctgataaatcaacttgcattcatctcctacacggtgcaactcgtcctggccctatcacctatcagacgcatcatgtactagactctcttctccatcgtatcatctgatccctcacgacctgcgcacagatcccttgtgctcagtcttaagctctgacatctttgacccatccaaaccaacgctttggatagccgagtgcttgctagtctatctagactcggtggtgagtgagcgaacggtggaatggtttcccaaggtgtgtactggatgggttggaggaattgtgtacgagatgttcggactggagttagtgtttttcttttgatctgctacgatatttgatatgcgatttctgactcgtcaatcgattttcctcatattctcacttcacagcgattcatttggaaaagttctcgtctcaaatctaaaggtacttcttaaccttctgattcgatcgacatatcccccaaatagacatacaattgcctttacttacctgtccttctcaatccgttcatctttttctgaagtctcggcaaatctctctcctttcatctcacctatatcccactcgatcatcccagccagatcggttcacctctaacggatactcctcaggcgctggcgttcaggatatcaacgagattcgacaaatcatcatctcgactgaagaaaaggctaggtcagttcttttttattctatacgaaaaccaaacacttatttgatcaaaaaccccgatgaaattggcgacggaatatatttggaaaataggactagtcgtttggaatgcttagacgaagtagaagagatggagcttctgtttaaacactatggtatcagctggggatggagagtaagttctgaagaagctggcatgtctgaaggtacaaactggggcttgacgactctaagattatgatgatttctatgttctgtttcatcgctatcgccttgctgttcattacttgtttgcagacaggctcgacactacaagctcatgctatgggagattatgtgattcaagctatcaaggagagaagatatcgatatgaagagttcgaactaaataaggaaaatcaaactgttcccccgcctcctaggctcgtcatactgaagcttgagctctgtcttcgtcgagactcaagtcgaggtgacgatggtaggccggagttcatgcttgtaggggacgacgaagaagtggaggatcgaaagacagacgttagggtcgactgaacgttctgaagtgcctgtgatatcagtcgcccccaatcagacaatttccaaaataataaagaccctttatcagtcgtgttatcaaaataacagagtaagaggagcgagactcaccaagtcccttctacctggtggtgcagacttgacgccgaaaagcttaattgtagttcccgtccagagaccaacgggagccagcccggccacgtagatttcaccccaaagtagagatgtctcccagatgagtgatgtaggtgagaactatcgcagatgcagataagagacaataccgttcagattttgagtacattaatctgcacgcaatgtagcggaagaaagcactcacgaagaattttcgagcgacgattggaggagcagatggtaggacatcggtcagagtaacctctcgaagcaattgtaagatctctttgttaggcccttgagtcttaatcatctgccgagcttcaaccttggggagaagctccgagatcataagcagaataggatcgagcggcaatctacgtatcattcgaagacaggggctttcagaatcctctcctctgttaaaatactatctatcagatatctgactcaccctttctgccagctggtcacccaatcttgcgttggttgaaatccgccacctaggcctcctgtcctgatcttctctaactcctcatccaacccatcgtcttcatctcctctctctctttcctctcccaaccctccgccttcttgaatcccatcattcagcccctctcgtctctttcccctcgctttctcgctgagcggtttttgtctcgcgttttctacaagacgcagagaactgtcctgagcggagtttgatcggtcaacctcaggtggattccctgaggacagcgaatgcgtagacagggccgcgttcgacattctttggttgagctctgaattagagagtgtagacgagtccatgtctgaaagaaaggctgtcttttcgttcgaaggcgcgacattgcctcgagtattttcagcccgtttgactatcagtacgagtagtcgaaaaaagatgaagaacattctcaacatacagattgactactgagaacctgataaacttagaagtcatgtttgaatgtgagaagtgacgaaccagcagctaattctctagacttctttatccgctggacctctcttagcccggttttgagtgtgaaagttgccagaaactgaaatgtgtgagaggctcctagaatagaatagattaaatttgggttgcctttggagtagaggttgatcagaagaatgtcagcaacgcatcagaattatgtgatatatattcaaagggattcactatcaagtcggtgaaagatgacagaacagaacgtttccaaacttagacagaagttggatgtcagcaagtatttcctctttgttaagtttcgtttattaatttctctgaaataaactcacagataatttacaagtcgagggtgcccttcatcccgcaacatgaaacctggattagatagcgcggtgaataactggactagcttggttgaagcttgtacactagtatcctgtagataaggtgcgacattggcaattgtgattgtcaaagcttaatcgacgtagcaaaactctgagtcagatggaacatttcgtaaagtccaacacatatcaagatcgaagagaagaagtaataggagcttaccagggaacaaagagttcaactcaggagttgttgcgatagagtatatggacttgattgaaataaagtagcattggatcgaaactgagtcacgccaacggaacagatttgaaaagaagagacaaagacactcacaacgatcatgaaatctgctgccgtaccctggatagcccatttcagaggaagtgccatagaaaccatattcttgctaatggcttgtccgaatgccttctccgaagaaatggtttgtagaatatatgcgcacatcctcaaaagaccatggtgggctgacgaaaatattgataagagatcggtaagtataaccagacagcctacaagcacaataccaaagggaggcgcggtttagaaaagctgaggatgatagactaaccaggatcgtctttcaatctaaggcacgtgaaaactgtgtgggccattatctctactgttcgtttctcatctgaaagaatgaaagctcggaatttctatatgaatagtttgaaggaccaaccggtcagccatgaatctaaacacggactacttcagaataaagaaagctccaccttattaaggtctatcaacttccaaaagagcatgactgtgtatttattcacgtagtttcttttagctcctcaactatcaatactcgagtgaatagatggtaagacaacatacaggtctcgagtaataacagaggtgtgttggagctactcgagaacagtccattggccatttggagatgttgattgaagacgttcaggatgctcttgaggatgaattcgaagtcttcgctccggtgctacatcacgggcacaaccagtgtggattggttctgattgattatctttttttccgttcgtcacaaaacagtggcaagaaaatagggatgataaatgcgcaccagcttggacaagaaatattggaacgagttcccctttcccagttccctatcttcgtcctcataccaataatctagcccacatagaagcacgtctgccgctccttttctcagtctatctctccctacgccgttccctgcatccgtagctgagccgacactccctgtgagaccggccttgactaggtatccgaagggcacattcttcactccatccaaccaaccagcttggctcggattgaggaacgtgttgaggagcgaacagaggagggagagtgtttttcgtttggggagtcgttgagtcaaggaatgtagaggtggagaacgaaggctgggaaggagcggtggaggagtaaacatcggagtggacagaaggatttgtaagaatcctaatcacaaggaagcgaatgatgtatcaaacctcattgagtaataagctcaaagtaacgggggtgagattaaatggacagaaaccgaattcttctacatacgaaggacttcgattttgttggattcatagggcgcagaatttcccagcgatatagttgatccaatccccttctccctgcaaaatcatgcaattgaatataggttgaattactcggacaggtgccagagaagataattatacgaaccaaatacagtaagacacttttccaatctgtgggtcaactgtttccgaagggatggtgaatcctgcgcagaacaatagatccactgccaatgtgaataatctatctgccaacggaggactcaacggctttctaggggtgtctggtacgctttctccgacgcgctccccgccgtcactctcatttacagactcttcctcatcatcaccaaccacaaattgtccgatgctttctggttcttcctcagcctgaacaacctcctctctagcgctccagagcaccagttctacccaaccttcgcctcctagaccagacacagcggcgggaggccatcctatctcatacagcacaggtaatatgcggccgataactctcaagcagttaatagcttcaaccgtagtagaaggtaagtttgcagacgaagatgatgggttagaaggtaggtatgagctgagactagatttggaagatagcggactggggaaggaaggagaggcaatgagctgatctaggtggtcggtcaggtaggaaagaagggtctcgatgttctgaggatttatttgaagcgtctgacggactgaaatgagaggttttagttttcttccgggacgtaaatttagaatgatgcacttgaggagtggggactttactgtcttcgagtgtgatgagagaatagacttcggaggctgagtcaaagagagtatagtactggttcgagcgatagtcatcaggtcaacccggatcgctctcagtgggctataaggccaaattgtacttacttgctcccagtacttgtgatcttcagtgctgataagctgaaagaaagaaaggcacatgaagcgttaagtgaacacgactaaggtaggtagacatcagtttggacaactgaatcgaacctgtctgctgaagagcctcttgatgcctccttgcttcgttcgaaagttgagcttggtatcctctgaggagctatataagcctaatgcagaaggaagggagaacatgatagatcacgcaggacgcaaggcaatggtgatgatcgtgatgatgatgatggtgatggttgatgaattagttgaggagacgatgctgtccatctggatgatatggctgtgtcaggtgtcatcacgttcatgtggcgttgatcagatcgacctccgcccttctgatagactcggctggtcaccattagactaccatctcaatccaacttgaatccttaccttctcttcttcttcgttatctcttagtcgccatgattctcttggaggtaagttagttggactgcatgcgtgaatccgtagtagaagaatacgtgaccgtaagaggaagcaaagaggcgatgctgcaaatgtcgggatatccatataggagaagacttccatctctcttcatcttgttgtgctttacatcccgtgctcgtcgagaatgcaatctttgatggtcaaacataagtaatatgaataggactatgacaggtactgatttctcaacaacgccttttttcttctgatctttcttttccaaattagccccacaacgttatcatccgaactgtccttaccgagaagctcatcaagtatgtctcttccccttcttcctcttctctttcttcaatctgctttcgtcgctgatgttccttatcttcactcgttcgtttacgccagaccaacatctctagacatttcctttgttgattatgactcagtccgattccatctttcgactcctcaaaagaagacggagatttggctgtcgatggcaatcaagtgttgggcggacatcactcaattcggcgcgttagaggtgttgaaaagacagtatggtgactggatcagcgacactgttgaggaggggtttgatgtaacgctcaggctagagctggacagattcccggaagagggaggtaagttctcgttcttatcatctcgcgagacactcgtcgtcttttacctttcagtttatactctcagatcgatactctcaactcatgccttctcatccttgatcttttcctctaaaccctttttatctgaatcgatagaggagcgaacaaacctaatcaactctctctctatgattaaaccgaccgccatctctgctcctttcgagagagctttccatgcacagacccagattgccccgccttccgaaggagaggctatccagccgagcgagctcatgcaaattcattaccgagaggatgaagcaatctatatccaggctgctcacgaccgagtcactgtcgttttctcgacagttttcaaagaggagaccgatcgggtgtttggaagggtctttttacaggttcgttcgcgtatcctacttgaggctggcttggcttaaaacttgatctcacgcgtatatttatggtgtttttattgatgtggctcgctcttgcgttcataggaatttgtggacgctcgacgtctacctggaattcagaacgcgcctcaagttctgtacaccaaccgagacccaccgcttgagatccgtcacttgcctaacctcaaacgaaccgaagacgttggatacgtgacctttggttagttctcctccttgatttattcccttaactccctgaattttgctccgcgtgtctaacgtgcctgtttctgatttcgatctttttctctgcgcgcctctccagttcttttccctcgacatttcactccgatcactgcaccaggaacaatcattcagattcagctcttccgagattatcttcactaccatatcaagtgctccaaggcatatatgcattccaggatgcgttatcgagttgccgaattcctcaaggtcctcaaccgggccaaaccggagaaagaggagttgaccggggacaaaggcagaaagactgttaggttcgttgattgttttcttacttggtttacagaactgtttggccgaagaagaaagacggatcaattgactgggatgtctttgttattgaatttgtgcatcttccatgtgaacgtagtgggcgaactttccgatcccgataaaatattctccctcctcctttttgtcggcctttctttgagctacttttatgataactttgttctataccactggcaagagtatttgccacctctctttgtactgagacatttctctttttgtcctccctcatactttcatcttcttatctggcatgatgatacacaagctcttcccttaccgattagctctagcaatatgaaacactggatggttacgtgtcatgatagtaaccgctgagcgcggctgatgatatagccggccgggcaatcaacagagaaatgatgatcgccttccttctcttcattctcacaacgttcacgccattcagctcctctacgtttctacctttgtctgtcttcgatcactcacagatggaagcgctggatccaaactcaactgtctcagctcagaaccatccatcattgttcgagctccttgcccaagatcagcttcgatcgcttcttcagccagctgttcgatatgttctcaatgtatagatcctctctacttttttccattctttcgtcgaatctatatctcaagtaacttgttgacttggaaccacaacgctttttgaaatgtgtttctctataggttcttgctcattcttatccgagatatctgattccagttgttaatcgacatgaggaattctatgcgctcttgatgctcttggtggagagacatcaccttctcaaacacagttcgtttcttctttcttttcgaattctcttccttatctgtacacactgttgggtatcgatactgatggttcaagatgatccctctcaataggcgcctcattttccgaacacttctatggtttaagacgaaatcgagccagtttattacctacttcgcgatgggacacctttgatgctgatcacgggggatccaaaggtcggcgccgacttcaactcagtaatcaacagatcttgacaagtttgttagaactcgtgagtatacatcatgtcgtaggaataatctctcagtacatatatacttgaatgtttcgactgatgttcatctcgatggatctttgtctaggtggttttgccatatgttggactcaagctacacgatcgattcctctctatgggagggggagctgatagttctgttctctcacctgattcttcagatttctcctcatcttcagatccaagttcttccccaccgagtcgtctacaacatctaaaatctagggcgagaagtctattcttgatattatatccttggattaacctagggaccgaggtcggtcgactggtttggagtctaagctatctgttcgggaaaagctcttactggcgtgtcgagagttggatggttggatatatcataggccgcatcacccgagatgacatcgtaagtgttgtgcccgtctgccctattcttacgtagtctgacatggcgttctacttggattttgaaaaactcaaggagagcccgattccaaaacgcccaacaatcttcacaccattcatctctcggtcttccatcttaaaccgtatcccatcgcctccctcggccctcccttttcttcttctttctcttaaatttctcgaattttatcactccccaacatctcctttccaactcctatcttctacctcctcttctctagacccgtcatccaaaaaacatacgccgatccttcctcctcccccaagaccgatgccttcggtagaaggtgctcgactcctagaaggaaagaaacgaggggcgtgtcctttgtgtggactggcgtggagagcgccaacagtggctggccggttgggttgctgggtgtactgttgggggtgtatttgggacgaagtgggtgagaagggaaaggccgatcctgtatcgggagagggatgggtgacgagagaaaccttgagaagagttctaatctgagcaacaagtgtttcaactgaaagaggaaactgactcgaagataaggggaagaggagcacctaggagaaataaggaaggaatggcggcatactccttataaaccccatcaacccggtcatcgagaagctcttcagaccgatatatctctgctgcgtcgtttcgagcttcaagaacatatatacccaactcagcgcatacaacccccctcttcatctgtcctttcctcttgagctcaagaaccaaacatcaccatcccaacgttcgcctgatcggtcatgtgaactagtcctctctttcgagaccaagtgtctcaagtatctccgcactttgtttgccggtacatgcggcgtactgtaaccaaagttgagtcgagggatagattgtgagagaagatgaaacgcagagagccgataagtaggagagatgggtcagatcgtatgatcatacacatatgtgaagattaatgacagggaagaatatgtaaaaccttttgaatcagattcttttggccaaacccaatccaaccaagaaacagattccatgagttctctagatcatcttgtatgatattgatacattttgtaacaattgtcagcggtctcacttacttgcacagcatcccgacacttgttttgagaagtcttgtcagtcaagatcgatttctatatctgacagttgtggggtgtatgcgtcctcacgagtgataagatcaaagtattgacaaacctcgttgtagatatgcaatccttgaatatgtcgatcgacgattttctttgcttcttgatctagatctagacttgttgagacaggaagagagacatcgatgtgatttttggactgatcaatcgttggatgaaggatagtgagaagctgggcctgcaagacattcaattgagtttgtagtttctgatgtttctcagaaagagcattagaagatgtgatagccatgtagggagatggtgagatatggacggatcgatgagatcgaaagacgaagttagagttgttgggagaggtgaaagaggagacaggagaaccggtaagagacaaagaagatctatcccgcataagtctgtctggaccacaattctgtcaagtagtagccgtctgctgattgttagcaattggcttttagcatgtcttattcagttgtgttcgagcctcctggtcaacaatgtatacgttttctctatgtgtaatacaaagataacttgttgaattaatctgaaagcaaaaaaaaagcagtgaaggtccagcccaagagatatacacaaagagaagtccattgatcatgaagccgcctcgggtccttctccaccaggtacgagctggtttcatgacaattaatataaaatcacagacaaatcacagagtgtcaaatcagacccatcgtgatcgagttaaagcgcactctataagatacgaaagcagtcataacaaaaagatacaaacaaggacgtacgatagcgatattcgtgccgttgagaagagtttggttgagagaggtctttatgcgaccttctggagtggagtgactatatttggttaaaccagacaaagtgttagccaggatgctcttgaacctcttctagcaataactcaagatattgggtcagaatatatggaatggatgaagcttactattcagtgacattctcgaggaccatgtctacaatgcaatgataaagatggttccaaattcaatgtcatctatttctccagcattccaagggtggcagtgacagcaatgatggcgacaacgaatggtagaagaattagccaggacttactgacgtagtcgtcgaacccagtcaaagttccgacaaactctcgatcacctttcctataatcgtccatgtcagagaagaatatacacacacagcgtcaggttatacacagataacagaagaactgagcagaaacagagaacatacatgaccacccagatcttggatccaatacatctatcaatgagctctgtgtatccaacccagacgagtccggccgggcggacgaagaacgaaccacatgaatgaatagaagtcagccatcaaatctgccactaaatgtatcagaacagaagacacataccgagagggagaatctgggaagccattctttaattgaagagatatgaagctaggattaagtagatgatgatacaagtgcagagtgatccaaagatgagtgaagttctagtcgttggatgtttgtgtgtagagaaagcgaaaaagctgtgcatcctttctcttgatccccacaaggcgagaaatgacgatgaacagagaacagctagacagataaagactgatcagatgagctgaaagtctctcttcttcttgtttctttcgatatacattgaacatccatcttcctgcacaaacgaacacgatgtcttctgagccagatacagatcttgacccggtcgttttggacgacccggaggatgaagatgaagatgaagatgggaatgaggatgaggacgaggatgaagatggagatgaggttcaatatattgaatctgacgtgcgttcttatctcttgttttgtctcttccttctttctttcctttctgtcaagtcttccggaaccatattgactggccatctaccctggtctctgacggatgattaacagtcagaatttgagggtgaattcgtcgaccaagatgggccaggcctcgagacgctccatgtacgtttcgaagatctccataaccctaacatatacaagcctgcgatttgttcagccctagtattcatttctcaagacggtctctccctacgtatatcaatacatgctatgacgcacgaatacaaataaagggagacgatctctcggatgactctggaagtggtgatgagtatgatgatgagttgaaagctcagggaccagacgctggaacctatgattctggagcggaggatgaggtagagcaagtccaggaggaggttcgttcgcttactcttcttatagctcttatttcgaaaattgcaaaaagaacagacatatgctgttctcagagggattagctgaccgactggttgccacttattatattgtttgcatgatcgtcactcttgataaactggtaatgcacgaaactacagtcgacagtagcccctcgttcgaccaaacgagctgctatcgatggtctagagacaatcgaccaagaaggaacatctcttgctgagaaagagcttgaagatcctcttgcagctgaacctaaagatgcctccttaccggtggtcgacgacgtggttgataaggatgaacgagtcgtcaagaagacgaagcttgaataaagatcatcaggctgatctaggtgcgaaagattagtcgttcgagagcaaatgtatcgattgaatgaaagcttccctctttttacttgttagaaagaatgcgtgctctatgaatgtgttatcctggcctgggacggatcagaaagcattggtgagaggtactaagacaaaaactcttccgttaggtgttgattgagtttaaccagcctaaactgctatccggtgtctcgtcgaatgtcaaccttccgttctttccatgtactaaaaacaatcatcttgtcaaaaatcgtcacatgctcattacatccaacgaatttcctttctgaagacgacacccaaaaaagccaaccctcttgagaaagttgcttagatgtaagtctcgtatcggacaggggcgagggtctgggggatgttgccctcgagggtgatgtggtgagcctctcggggaagggcaggggatcgcttaaggttagcgtgctctgcagatagaagatagagtagagaatatcaatcagccgtttgacctttcaaaagagggttgaatcggaacaagaacgggacagggaggaaactagtggactgacctcccttggccttggcctccttcttcaaggcggcgttcctcttgactcggtccaagaactcctgtcggcacttagagtgcttgacgtgctcgattcggaggttgactcgcttctccatgtatcggtttccgacaaccttgaagacgatcactccaacacctcggggggagacgttgtagacgacaccggtctttccgtggtagaactatcatggtcaagagcgacgtaagagaagatgttcgtgtgaaagggttggtcgagggagcgaaagagatgaccgggttggaaagaaaatgaccacaagcagtagaaaccagacaaagagatatgttttgtcagggcaatggctttgatgttttgtggggaatgggacgtggtacggaccttgtggggcatacccttctgctcagcagcgttggccttgatatcaacgatatctccgaccttgtagatcgtaaggtacgtagaaagagggatcgtacccttctctgtttaaccaagatgatagctccaaagtcaactttcacgtttcttccctttttttcgaatgctttcgccattcaaaatgctctgctgtcctttctctctcgtattcatagtctgagaaccaagggaacgaacttctgaagtccctagcgaacatgtggcgcgttcgcgctcggtatccgaaggagtgaggcatcttgaggaaactatgttgaggcggggaaaattaggacaagacagaggcgtcgggttgggtatgtatgtagaaggaaggtcagggtggttgatgtagaggatgagtgtcggtgaagaaagaagttattttttttgccggtagagaagatcgcgaggagaggaatgataaaagaaaaaaaaaacgacgtagagatcagttcccgaaagctcaaatttagagaaacgctcacaacggacgggtccacagcacacagcacattcgagtctcgctaacatgttgcacttgtcgtcccctcgacccaaacacaccttccagacttcgttctatcacggtcttcctgcttttctcctttttcacaatcgctcggccatactgtatttggctacattcaacattccgcctctccaaagaattttctccccaaagaacgaaacgtggatagttttcgaccagacaaatcggatcgatacaagagagatttgtgtgctgtctgctgctggactctggacaacgctggagctgttctcctggatgggacacaaaactgggatactaaccttgacggggatggatgtcgagtgagctgggactacgtctgctgagttggacctttcgcacagaccgtgcaggggcctgctcgtggctggccggctcgcaaagcaagcttggttacgatcagcaaaagtcagatgacttgtagccatgacttctgagaagagtgatagacaacgatagatgaatgtgtataattgattgtttggcttacataattacgttggtttgttcttgtcaagtccacaagcgagagagaaatttaaagtcgttcgatcccgccgccttctttagtttcgaccatatcctcaagatgcccaggtaagttcacgttgttgatctagatggatttcctgtcatacatgttggcgtcatgggagttcttctcggttgctgatatgtcgctttatcagggctcctcgaaaccactccaagagttagtttgcacaccatgcccttttttacagattcatttatacgttgcaagaactccccgtagaggggagtggagtgaagcattcatgcttataggtcgattaaattccctacctcccatacagcctacaaggttccccgacgacctttcgagtccgctcgtctcgatgctgagcttaaggttcgttctcttctgccgcgttgtaaactgtgtcgatacgcgaaatgttgattcggagtttttctcttcatttcttggttagctcgccggagagtacggattgaggaacaagcgagagatctggcgaattcagcttactctctccaagatccgacgagccgctcgagagctccttaagcttgatgctaaggaccccaagaggcttttcgaggtttgtgttctgcttttcttcgccttcgtttacctacatagaacgggccgcttaccttatttttgtttgacaactcatgtgatctagggaaacgccctcatccgacgacttgtgcgaatcggtgtgctcgatgagacccgaatgcgacttgattacgtcttggccctcaagaccgaggacttcatggagcgacgactccagacccaggtcttcaagtccggactcgccaagtccatccaccacgcccgagttctcatccgacagaggcacatccgagtcggcaagcagattgtcaacgttccttctttcgttgtccgacttgactcccagaagcacatcgacttcgctttgacctcccccttcggtggagctcgatccggacgagtgaagcgaaagcgagaggccgccgccgcctccaagggagacgacgccgccgaggacgaggaggacgacgagtaaacttttctactcttgtcaactattctcatgggcttccacaccaatttcttgcaaatctgaattacatggcacacgagttgagcgacaccaagtcaatcaagagagaaagaaagctcgatggcacgattagctgaatatcttgaatatagtctacaattcaggcccagatatctgtcatgtctagttggccatatgttctataaccacgaagaaaatcttcattgggccatatcgctaaccctaacagctggattagattagatccaactggcttcactgacgagaaagttacacagatccgaccttctaagacacatgtcgaccagctctttaccctccgttaaacgagctctccggaaacagattcaaacgatcctccggtccatcccgccggagggtattctcgctcagtgttcgtgtttggtttgacccgatttgagcactaaacgtctttgtcgtctctagtagttctcctttgactgacgtacttgtcagaacatgatgaaatcctcttccctctcactcctttttcttgcacaaagcccggacggtaacggatcaattgatccaatcgactgtctatcggtcatcacgttcgatttcagtgtacctgcctacggttcattcagagatccaaacctttgaacttattaagcatgctcttgacgctggaaagagcgtatatgtaccgttcatcccggccggttcaaacacggatatgcaaatgttaaggctatacgaggaggacgttcctatgacagaagatgggtccaccgatagtggtttgaaaggagatgggtggaatagagacaaatggggaattccagttttgcctttgacgagaaaggacactgggttggaaagagaagatggtacgttcttctccaccttgaatgtgttgcttactagacatgtttgatacgctaatgcatttctttccactttgacttttgaactatggtggttgggcgatccccaaaatcattagcttctacttcagctcattacctcgatctcatcttactaccaggtgttgcattctcacctacggcctcttctttgttctctcgactgggccatggaaaaggatattacgataaatacatcactcagtatcggtcgatctgtgcaggcaagaatcgacccggtccgaagctgagtacgcgtcttctcttttctcgatacccaacggacgctattttgtgacagaaggatgagactatccaacagctcaaacaaactaacgctcttgattaatcacccgctcaacttattgctcaactcagttggactggcgctgaaagaacagttcttagacaaaaacatggtccctataggagaatgggatgcgaatctggatgaagtgttggttggagatcacgtgaggacattatccgaggacaattaactacttaagatatatacatgatttatgtcgatcggcatccagccggggattgatcggctgatggccggaaatgtgatgatggtcgaaactcgatctctctttttttgttcatcttctcatccctcttctctctttctactgacatccatctccaactgtctagatcagttcggaaacaagaagtggacacagagagatctttgctgaagagttgtattccagaaagggaaaacaaaggaaagaagcgccgaagcacatcaccaacttcagcaagccggtccagcccgatctcggatagacatcatcttacccaactcgtatcatccccaacagatagagtttttgtcgcaatgacggctctcgcatattaccagatgtttgtctccatacctcttcttcgttttgcacaccactcatgtgtgcatatgtgtgtgcgtccttccaaatctttcaatgactaacatctttaccgtgctcttcttcttagccatctgatctatactctcccaattcttggtcttctcggcctgctcacttccccgattttgacaaaatttgacatctacaaaatatcgatcctcgtatttattgcgtttagtgcaaccacaccatgggactcatggatcatcagaaatggcgcatggacatatccatcagcggagagtggccaaggcgtgtttggaacgtttctagagttagtcgaccgttaatactcttagccgcgcgtcgtttccgcgattacatttaacatctgaatttatccctgatcaacagtgttccatatgaagagtacgctttctttgtcattcaaaccgtaatcaccggcttggtctacgtcttggcaactaggcaccttctcccatctctcgcgcttcccaagactagatcgtccgccctttctctcgcgctcaaggcgctcatccctctgcccattatctacctatttaccgctcaccccagcccatcgcccgacccgctcgtgacagatcactacttctacatgcgggcactctccttactcatcaccccacctaccatgctcttggcagcattatcaggcgaatatgctttcgattggaaaagtggccgagcaaagtcaactattgcagcaatcatgatcccgacggtgtatctgatttgggtagattatgttgctgtcggtcaagactcttggtcgatcaacgatgagaagattgtagggtggaggcttggaggtgtactacccattgaggaagctatgttcttcttactgacgaatctaatgattgttctgggtctgtctgcctggtaagttgatctcatcctctcttcctttggtgaaaaaagctgtttggctgattgctgcgaactcacccatcggaatctgtagcgatcatactcaggccctatacctgctacacggtcgaactatttatggcaacaaaaagatgccatcttcatttcccctcattacaccgcctgtgctctccctgttttttagcagccgaccatactcttctcagccaaaacgtgacttggaactggcagtcaagttgttggagaaaaagagccggagcttttttgttgcctcggctggatttcctagcgaagttagggagaggctggttggactgtgagcacgcattctttaggtttgttcggtctttcaccttcatgtgcattcgctgatcagttttcttggtgatccgggacctgcataacagatacgcattctgccgggtgactgatgatcttatcgactctcctgaagtatcttccaacccgcatgccacaattgacatggtctccgattttcttaccctactatttgggcccccgctacacccttcgcaacctgacaagatcctttcttcgcctttacttcctccttcgcacccttcccgacccacgggaatgtatcccctcccgcctcctccttcgctctcgcctgccgagctcgttcaattccttaccgaaagggttcccgttcaataccatttcgccttcaggttgctcgctaagttgcaagggctgatccctcgatacccactcgacgaactccttagaggatacaccactgatcttatctttcccttatcgacagaggcagtccaggctcggaagacgcctatcgagaccacagctgacttgctggactatggtctatgtgtagcaggctcagtcgccgagctattggtctatgtctcttgggcaagtgcaccaagtcaggtccctgccaccatagaagaaagagaagctgtgttagtggcaagccgagagatgggaactgcccttcagttggtgaacattgctagggacattaaaggggacgcaacagaagggagattttacctaccactctcattctttggtcttcgggatgaatcaaagcttgcgatcccgactgattggacggaacctcggcctcaagatttcgacaaactcctcagtctatctccttcgtccacattaccatcttcaaacgcctcagaaagcttccggttcgaatggaagacgtactcgcttccattagtcgcctacgcagaggatcttgccaaacattcttataagggaattgaccgacttcctaccgaggttcaagcgggaatgcgagcggcttgcgcgagctacctactgatcggccgagagatcaaagtcgtttggaaaggagacgtcggagagagaaggacagttgccggatggaggagagtacggaaagtcttgagtgtggtcatgagcggatgggaagggcagtaagacagcggaagaataccgacagacaatgatgagtgagaataaaatcatcctcaatcttctttctctaggtgctcttttttgttttctattatgaccaactctaaaggaactggccttgcagatatttctcttccccccatcttcctcctttccatcgtttgttctttccatttttgtcggtttactatgtcaattctttttcttgctttttcttatcaatctagacaattctatagatgtttagaatttatacattgacaggttatagaccataaagactatatggctttggctactagagagcaaccgcaaccgatggtggtcgatacgcggcccttttggacttgggtgccctcagaccacagaccaccaagatccccgtgggtcacgggcttagcttgtgccagccccagcagtcatgacagtcccagccccagccccagcctcactagcaacagcgtcaaagcccggcgtccttgccaactggttctcctcctgatgcagggctaggtgcagcatgttgcgcgatacgtcgacatacctgttccaccaagtctgagagaacacagtaagcaaacatagagagtagtgagcaaccgacacatcatcttgagccatacaacacatgtcacttactcgacagacgcttcgacactcctagatcgcccacgctttgcctcttccagagaactcgccatgacacttcgagcacactctcgacgtccgatactcccggactttgcgagcctggatcagtaggtagatcctcagcttggcaaacagcaccttgacaggaccaggagcctgcccacgagaaggcgccgtcgccgaaggccaggaaggtgcgtggacgtcctgctgacagacggacggccaccttgcggtacgtttgctcgcggctgatgtgcgcgccccagtggagacgtctccaccgccgagcggcgaagaatgccgcgagccaagagaaggactgatagcgcgagacgagagcagcatggagaccatcgagactggcagatctgaaggaaggtctgaagaaagaagccgaagaacgataccgaggtgggcaaggcagtttgcgaggtgagaaaggctgtttgcacagttagattgagcgtaagtgcgagcgtaagcgacactcgccacggagagtggttgacacttccgcatcgttcttcatccacagccgctgttcctcttaagcatcattggcagacaaatatggacatacataatcgagtaagcatgtcagaatttacatctgaatattacagaatacaaagtcttgtgtacaaggagttcacctattgtatactctaccgaaaagctgccacggaacaaggttaaattatcaagcttgtccatgtattactatgtatctagtggttgtttggcgattatacgaatggatatgggatggaagtcttttggaaatggaagggaaagcacgatggaaggaagagaaccgaaggagagaggggagggggaataagacatcaagagccccacggtattcgtctactctatcgacctgggctcctctctcagttttccatccttctccgttcctttcctctggaattcatcctgggagcttttgagggtggtttccgaaggtcttctggacaattcgctccaaattgtctcatcgatcgttgcggttgcggctgaggttgtagtaaccggcgatatatgcatgcgtataggtgcagccgaagattcagctacactcgcaggcgattgtgcagggggtcgctcagatttggggacgtaagcctctttaagggagtaccgctggatgaagaagctcatcagtagacatgctcccaagaaaggacagtagatcttgaacagcatctgttaaattgaaagataataagcagagcaagaagagataaaaaaaaaaagtgaacatcggaatagaaacgtggagagccaaagatatcaaagaaaactaaacgcacagataaggattcagaaaatccgtgaaggacttcctgtcgaacgcttgcaggctgtaccaactgaagagcatgataatcatccgacgtcgttggcgtaccagtgaacgtgtacccgtctatccgatcaagccttcgagcgagcgaggtggagaggacggctccagagatggaaatcccagtggtggcacctagagttctagtcaacaggaatgaagaagaagtcgctgccatatctgaaactggcattgcggcttgaagcaagatgagaggtggttgaagagactgcatgacgagtgcaatccgtataccacacaaaagatgtatttaagtagagcctcaagaaggatgaaggtacaaggacaagcgcaggaaacttaccatcccgatacctactccaacctactcataattaaagcagaaattgcagatactcagaatgccggcttatgagagaattaaaaagccgaaggaacaagagagtatgtgtgcatgtctctaccaatagaggaaagatctcgttcactgccgtacttgaactctcattcataagattcatcaatccgaatcctattaaaccagagcatgatcagcatgcatgctttacaggatcaggaagccgactgtatgttcgggagagcacgaaagaaacgaacctaagcatgcgatcgcgtagccgactcggataaaacttcggatgtggccgtaccgggagatcagccagccagtaggcactgcatacaagcatacagacgcctaatctcgtcaacagaatgtcatagaaacagatgacgaagggtgaggacacagcaagaaagacaaaaacttacgactgactgcgctgaccgttaaggagaaagagagcagatgcacaccagacatcgtagcagatgtctaaccccaggaaaaccattataatatggttaagcattatcatccaaagcatttcttcctggatgaacacaagcagaacacatgatactgactcctttaataccctggaagaaaataggaaggtaaaatctgagcgcagagagcaacaactgatacgatcagccacgtacgagcctggaaggattagtcaaagagaaaagcacacacgtagaagacaagaacgagaatgcttgcagataactcatcagcaacaacagaactgtcgttgggttctacaggagccaataaagaatcagtataacatcaaaaaggttggtcagatcgcgcttcaacatgttgtgttgaaataagaaacattgccatgccttgaagaggcgaggaggaatgattgccttccgtttggtcgttagaaaatgcccgatggtaactccgaacatggccgctcctaccacaattaaagctatcgaagctgggctaccgactaatcgaaccgaacgaaggaagagtaccagagactcagatggaaggtcgtgaaggacaggaaggcaggcaataagattttaaaaatgctcggtaacttacatccatggtctgtagcttgttcaaaaccgacgacgatacaccctagagacaccatcagcaatcctctattttgcccaagacaccgagacaagaagcgagattatatacacagaagaagttgagcttgcgcatcttttagtcgcttcaaacaagcctaaaaaagagatacgagagaagtacaagaaataacgtacaagccaataaagtcaaacactttcttaaactctggccatgtggccatctttcgagttttgatatcgaggaagaagtagagcacgacgagcgccaaaccgcatgttggtaggttactgtaacatttggattgtatacccgagtgaggataggatactcaactgtagagacaaataaagttttcatagctgactgacataaagaagcaccaacgccctgatgttcatagaagagttaaggttgaacgcacactttaggactggacaattcacagcttactgagaagctagtcaaactcgatgatacatacaagtagattggtctgtaataagaccacccaagataggcctgtagcatgatataacgatgaaggtctttttagtagatatgcaaactcaacataagccgcatggctgctcaaacagtacatgccccaagacacttgcaatctatagttatcgtgttaaatcggttagtcgtcatcatcatgagagttcgatatgaatcaaagagaagagaacgagaatgaataccgaaacttactccccagacacctcctaaaaaaccttggtattctttgaggagagaaacgttcccaggataagtgattttgaacaaaacgttgggcaagtgagttggaacagagagcgaaatgatacttactgccccgctcagacatcggcacgatatctgatatatcaagaccaagaccacattgaaagaatcacggaacgaaattgatgaatacgaccctttctgcgcttaatctggagcaaccaattgagactatacgtaccactgatgataactgtacacatagacatgatccctccagcacctaagttggcacaaattccgagcgtgtcagaaagacatcgcgtcaccatagagggtgagcgcggtctacagagaaataagtatggatcgtatttatagtggcttaccaattccttgaagggcccgggtggcgattaaccactgcatactttgcgctgctccacatagctaaacgagatagcgtaagatgaagagaagaaggaaggggatctagcctgatagacgtgggtgtatctataaagagatatagataagaagaagaaggtcttacggcagaagcgatcatgaagatcaagacgctcatctcaagaatgatcttccttcctaacatatccgacaatctcccatactgggtccgggaacaaaatcaacgtccggccatatacttatatactctgggaaggatgatactcacacaaggcgtcagagttgttgtcatcaacatgaatgacgtgccaacccaggagtactgggaactggttgcatgcagatcactagctatcgagggcaatgctgtcgagataactgtaccagataggatgcaactgtgtgattagtaatgagtcggctgaggttcccctctaacagtcaaagccttatacttactagtctgatcgagctgagaagaccaatcaagaatatggtaaaatccagcttaagtcagccatcggattgcactcggcataactaagatgagacaagggatcggtcgtcatcgaatattctatactgacggcggccaagaacatgcaaaggatcagactggacgaccacgatatcaagtcaaagaaccaatcagttacaagacatgtagacgcaagaaagtttcaataaagagcgcatatcatacaaactcatacttgggaaggaaatgagaagaaatggatacctacgctgagaacacgaccgcaaaattctttccttccaaactagtatctactaatccttctgactcctttgaaagcgtctcctccggtgacttcttactctgagcttccaaatcggacggcggcaactcagtttctcccatatttagatgagctcagaaatcgttgcaagagatagctgaagagaggtgattgacagaaatgactggatcggttgttacttgatcggaggcaaggattttctcatgatcccaccgacggagaacgccgaacgcgcagccatagttctcatgacgatatcgttaggccagcatgtgtcttggcccaacataaacactctttagatttctctcagacgatatctttgagggtctacttctgacggccttgcccgttaaggcttggtggtggcttgaaatgtgcattctataccggatacacaccttgttcgaggaacacggcccccgagacaccgtggcgagacggactactcgtcgtcgggggcatggcctccgcctgttctcgctcctgccgctctcgtcccaccggccgttctacgtctttttggacaccgagattctttcaccatgcttagagcataaaacctattcaagccaacaaggaggatacagttgaggatattatcagtttcttgtccaactcgtcatctcatatttatcatcatctgtacacacatctaccataaaagaagccttcttttctaataccatgaattcattaaacatccagtctgtagctccgccgttctgagatgaaacctcagaaatccgggtacaacgttctcggatcgaccatgttcaaactcggaccactaccggatgtaggaggactacctgattggctacgctgagttttcagaatccgaatgatttcggagaacgaaggccgctctttagggtgttttttccagcagctttgggtaagcgcttggaggtgtggatatatcggcccttgaaaggacggtcgggtgtctttatctaatgagccgtggcgccaagaattcggttaatgagaaataagaaccaagagaggaagaataaggatacacggtcgatgaagaaatatctcgtttcgggagcagagagataataggggtcacgaaaaaacaaagaaagacttgccaatgatagcttcttcaacccaataatcatctctaccagggaaagggattgaccgggtgacgagttcgaaacatgtcatcccaaaggcgtatacgtctgatgatcggctcggtttctctatcttggatagaacctctggactggagataatatatgaccgaatgataacacggtcaggcagggtcttgataggattcggctctttgaagaaaaaatgaaaatcgaaggatttatacgaaccttctccatcgaggttcatcttctggaaatccaggaatatcttttcggagttgtcgctttatccttcgtagcccaaaattagcgacgagtgcatgacctgtgaggataccatcgttcggaccgtaaagattagcgcgatcatcagcattggcacaccgagttcttcaaatatttttctctttaattcgatagacatgatgtagaaggagtcaattagatgctctagcgtaccgtcaggggtgatatatatgttggtcgcctgatcgaggatttaaaggaagataaccgataaactaagtgagatcccgtttatctttctatgggacaccgttgagatcgaagatatagagcacttactctaagatcttcgtgaaggacttcaggtttcatatggtggagataatgcatcgcacccgcaacttccaacagctttttaacacggccaacaggaggaaaagtagaagccccgaacacacaagtctcagtcaaaacatgtacaccgattgctatccttctctttatacatatctttcaaacaggatgagtgaagaacttacgatagcagtaggattcaaagatcgattctccataaagtacttatcggctgttcgcgcgaggtcaacatatttcgtaacgacgtagagtccctttccagccgtggttgatgaggcgcccaaggttgcttgggtggggacgaggaaggtgtcaaatggacaaagagataaatcagctagctgaaaacatttgcttgtacgtgtggagagaaggtaatcaacatacttaggatatgtggatgcgtgacttggacccaagatcggatttcatccagtaacaactatttaacagaacccaaggaccgaggtttaaccatctcatgcttcttcccctacttttatcttaacatactatgaaaaagagaagtaacgtactcgtttatctgtaacaggcgggaacttcctaacgatcacattttgggatcgatatgagccctgacagaactgagaagcatactctgttctgtagaccgatttcaaagaaaaagcacgataaggtatatccacatcatgttggttttgcacaaggctaatggattaaggggggggggcggaatcgctcaaggtggaacgtacgaaatcacagagtcaatggcgatctctcgcctcgagattgaccactacacgaccaaaacatcagatcaattcagatatcagccaaataattgggacatcaaagaaggagcagaacgaagtctcgattttatggccgcacattcttcacaagagggatcttgccatcaacgaaagaacgttctgaggcttttagagcggcttcgaggatcatattttggactgatcctgagcttggctgactgtaagctttcagttgttgaaaaccagcgtaagcttctgcaagttctttgtctgaacaccagagagacaaaacgatcgacggctcagcaaacgagacaagtacaagggagaaagagaaatcacggaagaaacaaaccctctatcttcagcgcgtccaagatcctagcatcactccgagctatcagtccgacaacctctgcctcaagacctttctcgtcacttttcttgacagcttttgcttcatccataaattcgactagacccttggccattctctccagttgttgttggctttcctccgtgcgagctgcgagggatgagctatcatccgttttgatgcgaggggagggtccatacgctgtagcggaagaaggacgggatattggagaagaagaaatgggcgaagaggaactggaaccgggacctgaaactacggggggagaagacacagtgttggaaccgagtgtgacggcagggaaggcagatagacggaggaaaaattggtaagatagcgttctaaaggtgatggccatgtcaagaagaagacagagatctgtggaatgatcccagcattgacgccaaagatcctttttgtttagtttagaaagcaaggaccggctttggtcgagcgctctatgtagaaggcaaattttggtaagataaggctgatggaacatagctttgattaaagagctttaaaagaggatagaaaaataacgtacgaatggagttgtgagatcgtctcaacggtaatacattccaatcgatccttgtagatgactgagggcaagctcgatgagtgatactttgccagttggttcgttacgtttacaaacacgctgatcgcctccgagaccaaaagaagcgaggtaagcgggctgtaatccacgctcttagggggatttaaccgaaacaaagtccttgtaaggtaggtaagtaaccgcgggtggaaggagggagagcaagaaataggtaagaccatcgcgtggtatgaaagaccgcacctttacgatctcgcacatctcttccgcccgttcacctgcctggatccaatctgccgacctagccagccttccatctgatttgttgaggtcatgacggacgaaacccaacctagagctcgctctcacgatgtctgatttcctttgggcgaccaactctagatagttttggttcgcgtggaatgtcggtttggccaaagggggtggaacatgaagagccaggttaccggatgatgacgtcggagacgaaagcgtggaagacgtaggaaccagaagggcttgtggtttctggagtctgaatgaagaagatctcgaatgagcgggacgggaggaagacaaggactgatgggtgggggacgaggagagatcgacagtaagtgaggacggggcatcgacagtggagggaaatggaggggttgacacgcgtgagatggtatcaaggatgagctgtcgatcgtgttggtaactagaaagatcactggcagatgctcgttcgatggccttgatgtcgagcacggccaggggaaggtagatgagaaaagtcagttcaatcccggagggtttatggacaaaggagagaaggacggaaacaggacgagaaatagaaagaacgaaagaccaacctgatctagatctaagatggcggcttgatgctcgttggaagcgttatacgcactcgcacgtcctataaaatacgtcggttcggaaggatcaagtttgatcgcctatctacgaaacggatcagcagtttgtcggattgattgggacgatgtgcaaggagaacaaacgaacgcacctctgagaaactacgaatggcttcggcgatattatttttctggaaacatctaatcccgtgtcggtattcgaagcttgtgtaacccaaagcaagaacccagagtaagaacgtgagtcgttttggagaaaattgagtcgacacaaaaaggcgatatatgagagtcggaggaagctcactctggtcgagaaggatccagtttcagagcctgtctcaggagagaagagaagatgaagattcaaaggttcaagacaattcgtttcgcgtaaaggaatgaactaaagaaaggcttaccctatcaatatcctccgaagcggctttcaagtcattcttgagccgaaaagtgtctgatcgcttgacaaatagataggattggtactctagatctagtccttgtggatgaagttcgatggcctaaagcaacagatgggattgagagatcggaagaatgtgagaacgagatgtgtcggtacgatgcctaaagatggaagaggacgttgcctttgtgtatagcttgagagctccatcccagtttcccgctgcaaacagggtgtcaccctctctggccttttcactatcgatcacgattgtcaagaaagaatgtggagtaagcagacaaatcttgacgctctcttcactcgaaagagccaggctacagtgagaactacccactatgctttggagcaattgaccatggctgggagccgttgtggttgtttgatgtgaatgtctgactagaatataacgttcgatgagaatgtttgacgatattgtttgatgaagattcttcttcggtttttttttttggatcaagctgttttacttcttcgaccgatggtctctgtgtcgcacgtggcgaaacggtgttaactaatgtccgtctgtttctgtttttcactttgtcggctatctaatcttaggcctactggcctagactttatgtgcacatgtcatgttgagagcgttgtctgaggccaactctaatcatttagtaaagttgaacatcaataaggtggatacagagtactacaagaataaagattgcggaacaaagacaacaacgaggaaggagtcagtacgtatgtccagagatatacaaccaagacaagacagaatgtgtgttttctagtgtgcccatcagcaaaccacggcgaagtggcgaaaaaagtgtcgttcagagcccggttaggggttcagtcgcaaattaccataagacatcttttgggtggatagaaatgagggaggtcgaaaaaagaacagcagatatagagttcaaattttaaagcaacgtttcaaccctacatctgccgttgtaattccatctcctttttctccttggttcattctattcagaagatagaagtttcaaaggaagaggaatggaggaagatgaaacgaataaatgacaacaacaaatgctcacctttgaaggaaaagtaaggcaaagaacgattgatcgtgaagaagagagaaaaagttgtgatagagggacaaacaaaagaaatttaaccagcggaagtgcgttacagtaagtaacggtatacgagtaggtgttcgatccgttacttcgtttccgctcacagatcagcgtcccgttcactcgatttgaggagatggaaaggacaaaaatgtaccgggtttgcaacttgcgcatatcttggatgggttgtctccgtcttcttgactatctcatccgtcagatctgaaccccgagaaatacatcagagaaatccatgaggatgagtagtcatggcgctgagaaagtagccgaatatatgtttcctatttcttgcctcgcctcgacttctcgaaacgagtcaagaacgaggaagcatctagacgtacgtgattttatcagaaggtattctagtcaagccactggttaatctaataatgaagaaactaaagagataagagacacatattttggtgaaacaagcagaagttggtatgcgactcaaaaataaggattccgactttatttctatatccttctgtttctttgtcactttgtcactttgtcactttgtcactttgtcactttgtcactttgtcactttgccactttgccactttgccactttatctctctttatgttcatgtctgtctgtggaatgtagagcctttaccgcgctgttcatcataatcgacagccagtcaaaccgaccagaacggtgcccgatcaaacgagatctccggccaccaaggaggcatctatctcggcagcctgcaagacaaaaagaagtcggagtgacgaggacaagcgtccgggatgagcactgatcggtgctgctgatgtttgccactgctgctgagactgccatgactgttgaggatgaggctgaaattggcacaagctaagcccatgacctatggggatcttggtggtctatggtctgagggcacccaagtctaaaatggccaggtatcgaccaccatcggctgaggtaaccctcaccatgctttacgcacagctcatccggatcaactgcggatcaatcggaggaagatagacgctctgatgaccggaagacattaaccggggctcggcgaaggatgtcggcaagtatcgaggcagtcacctcaaccctcactgcgcccgtcagaagaatcttttaggttcggaccgcggatcaacgcggacggccttcctgtaggaacttatgttcctggaggaaaagagggcagttgttctggttagtatttttcgcacttttccatcattttttccttctcttccttctcccctttgcctcttcggatcaaatacagttgcttttggattctcaccctctttttcctgccttcttccttcccacgttgctctttccccctttccatattgttccttttctttctttccttcctcctcccttctctcctccatttatccccatagaacctatccacaggtacatcatccacaccgacatacaagtcggaatagaaaaatctaactacacgtccctcgatatccaacatttctcatcatgccggccgcctcgattcttcttcctgcccttttgtcttctcttactttggttcccagattaaccaacgcgctctctgcagcagagtggcgagacaagtctatctatcaggtcgtcactgatcggttctccaccggttctctcaccactccttgttatactaccgacaaagcatagtcagtctcttctttcttcgccaagatccgacgcgtgttactgataactcgatctttcttcctttgttttctttccgaacacgtacagttgtggaggaacttgggctgggatcagtatgtgttctctttcttacatatacttgctttcgcgcaaacgttcctttcttccttctcgtgtccaatctcaaacgaagctcgacgcggtctgaccacttgctgtgttgttatcttctttttggctcgtcttcgtcttctttgaatttgtagccgccaggttggattacatccaaggcatgggattcgatgctgtctggatctctcccatcacctccaacatcggtaacacgactgagggtcaggcttaccacgggtgtgtttttccttttatttccttgatccaccaagcattgtgaacacctttttcttatcatttcggtatctttttgaaacagctactggccgatggactttgctactttaaactcacacttcggaactgccgacgacttgaaggctctctccgctgcgttgcatacaagagggatgtacctcatggctgacgtggtcgtcaaccatgtggccaccactcaaggttctgcggccttcgttccgacctccgactatggagagtttgataccagcgccgatttccatcccttctgctgggtcaccgatgacaaaaaccagacacaagttgaacaatgttggttaggaacctcgaccttggctctcgccgatattgacacggagagcacgagcattgtcgcttacatgaacacctggatcaagacgctcgtttcagactattccattgatggtctccgaattgatactgtcaagcatatccgaaaagatttctggcctggtttcgcctcgtctgctggagtgttcacgatgggtgagatcctcgatggctcagtcgcatacaatgctccttaccaggatgtattggacagtgtgttgaactaccctctctactaccagattatgtatgtttattcgtccatttcctttcttgaatcatatcaaacctcttcagagttctcgatttggaacgtgaacacccaactcatttgcctccctccccccccctttcttccctttaggtacgctttccaatatgtgaacgcaaacctgggagctttggtcgatgttcacaattcattgctatcctcaatgaatgacaccaccttgctcggaacgtttgtcgacaaccatgatcagcccagattggcctcgcttatcaaggacacagctctgctcgggaatgcgtatacctaccctttcatcaccgacggggtccccatcgtatactacggacaagagcagggcttctccggcggtgccgatccagctaaccgagaaccgatgtggacctcaagctatgccactgacggtattggctacgctcttttcaaaaaattaacagccgctaggaagcaggccggaaattcatcctccacgttttacacaaacaaggccacggtctcttactatgacgccaatgagatcgttatctccaagccgcccatgctcgccattctttctaaccgagggtccagtggaagtggtagcgtgaccgtgccgtcgaacgcgtctttgcccgaggcggccgaggtggttgacatcttgacatgcacgtcttggaggacggacaagaacggagcgtcggtagtgtccgtctctaacggacaacctcaggtgatcctcccgttggcgaacattggtactctctgccctggaggagttactgcttctaccatcaccgccggttcgactgataccacacctgccaatccatcgtcctctgctgctgtggccagtgcgagtgcaagctcgagttcgacaagttcggccgctacgcccagtgggtcgaccgcctctggttctggggccgaaaagtcgatcagattgggaggttggtctaccgtcgggctcgttgggctcatcggcttgaccactttgctctagttttttcccttctcacttctgctactattgatcatccttcatgttgcatattcggacatttttctctattcttgtttccttgcctcacctgtcgtctcatttcttactggtctgaaagaaaagagaaacatccacattcccctagacgtcgaccgcctggcggcttttctatgttccccttttctttactttcgttctttggtctgtctcggtcgactatcatagactttttttcccttttccactttaaatccgtttcacttgtgtgtctggcatttcactccattccgcaccttctgttgttttcgttctcttgttttgaatttgtccgatcattctattaataccaaatggacgccttttggctggatccagcctttttattcctttccattgcttccagatgattggttgtcagaggcaaactatcaaaggattagaaaaaaatgataataaaggagcatacggtgcaagcagagaaataatagaaaatctggtcctctagcgggtttcctcgacatttatgatgatgaaatgatgatagcaaatgaaagtgatagtcgataaatagaaatgaaatgaaatgaaacagactcagaagaaggcaagggtggacagcgaacgccggtagcttattatttccaccctttcttatgatctgacgaccaaacagcctaatgtgcctggtgagtacctcggcgtgtttagactcgacgaggcggtgaagcggatcagaccggccagcggccagcggtcagcggtgtttgattagattgattagacaagcggtcaaagcgatcagaattttctttgtagtgtatatagatgtatgttcgcacgcggagtataaatctggattgactatggcctgaacgtccagcaagagagaatagcgaaaattgaaaaaggttgtttgcgtgtgtttatcaaaacatctgcgatgtgtcaactgtcttgggtcgtgtggcgtaagagggagggggaccttgtacgcctgttaatcgatcaatcggcaactaaccgccagatttgatcgaaaaggcgagcttgaacgcctgcttggtctacaattttcttttctttcttttctcttagtaatgacagaaactcaaagtcaaatcttagtgaacgttgcacacaaggccctcttgcctttctttcgctgctagtagctgatgtgacacggtaggttttgtgattagaactctgtggtcggaacaatcgaagagtttccctcgtacgtatcaattgttttcctctcttcgaattttaaatatacggggaatttaaatgataaaaaagactcgggtccaactatctctgtgttatctctgatcctgccgcgcgtacaaagatttatatctagatccatgcctgccgcccggcagtttcctcgtttcaccttgcgctacctgttggagtctttaacagcaagcacggtcgtgtttgtgtttgtacatgtgcaggaatcttctttgatcggtccgactgaccgccggtcaacacggacacaccatggatgccacaaactcagtacacagttctcagacaatgatacacgtatacattcacacaatttctctcctattggcaaacacatggacagacaaagacccatatacaccgttagcgtttctttccttgcgcgggtcctcaaaaggtattctttgttcagtccctgcctgtttctggaggttaggtttcgtttcgtttccttcccttccgaagagaccagggtcttcttcgtcatagttagttactctgtgtctcttctgacctgatcaaacactctttatacaaccgataaaatgttttcttgtcttctttcgtttactgttgatcatccaccatcgatagtccaaagagagaagaagaggagtgaaacaaaaagagaacagcagaaaggactgcacacacacgtatcaacacagtgagtcgttctctattcaattcgacttttggatgaaacaaatgtaccagacaagaacagttttgaaggaagaagggagaaatgtgccggagcaaagtgttgcgcgaataagcagctaagacgaagagacttcttcataggatgtctctcaagtctttcccattgggggatggggttggggacggaaaaaggagagaggcaggacgatattagattgtcagactctcgcagtgaagtgtgcccgcagtatatctggtgacagaggaggcggcgacaggaagaaaggaaaagacgcgatcgaccgcattgacggaataaatgatggaggcaacccaatggatctttcactctgcgaggcttcgtctggctggctgcctggctgggtgaataaaaaaaaggtatatttgaatttaggtctcccttccagcctcttcctcctctaccgcctgcccctctactggtgcctttctcagttcctcggccctgaccagagtttgtgccttgaggtctctgacctcggtgctgaactctgctcactcatcccgttcctctccttcatccttctttctttctctgggtttcttctctcttctttctctttgacctgtcgaccacaaaccacgaccacgcctggtgctcactcgattcttttgtgtgctctcttccaccggttcatcactcgtttccccttcctcttgctacttcttgcatctctctactcgcttttccttgacctggctggcttaagggacctctttagtttggtgagtagcttggattggagtttttcttcttatattgcctttttccctttcgtctcttcccgagtttcctttcattcggttttgccactcttcgttggtgtcgcaccaaacgtcgagcttcctacacaacactgacattatcacatctacccctgctggtttcatataatatatcaaaagggtactcattttcttgtacaaagactagcaagcaattgtcgaacgtatcaaaaaaaataataatcatatacatacacgcacagagaaaagagcgtaccgcttccaacaacatctcgtaagtctttctccttcccatttgctttcttctttctctcccctccacccatcctctcggttacgtctgagccgagaaagccatcaccggatgagatcagcccagactgttctctcggctcagtacggtccggtcaagcgagagggacctcggtcgaatgggggaccccactcttgaaccggttttcgtctgtggggaagcataggaaaaccttggggtttctctgttccctctccctcggccgcccaatttatacctcggctcaataccttgggtcacttcctctctcgtcatcgacgacgatctaacgagtttcgttctgtcgtatttttctctgcatggcgtttgaataccatccatctgctttccaacccgccctgaatcccgagtaacgaagggagaactgagaaaagtctacgcagaatgtttagccggtctcggatgctgacggtcatcgattttctcgcttgcttcctcctcctttccgcacagaatcgatcattccatcttgctttccccacacacacatttcaaacaacagatccaaccggtaaattagatacatgccttatctcgacccatccgcatctcccaaggctcccttggtgactcctcattcggttccagtgatcactcgaacagcaccatcgtcatcgaccccaacagagtcaaagcagaatctgtctaacaagtcgactacgccttcaggaacgccttcggcatctccctccctcaggtcacactatttcttctctccatcggacgatcattcggctgtacctctcacgtccgccatgcctggtctgccccgtcgagcaaggagccatggcagtgcttcgtccagccccgtcagagttctcagcccaccgaagcctccagggtcgatcctgcccagacgggcggtaacagataagacagtaggcactgatgaggtcgaatcccgcgatagcggcctcggtctctcattcgacggcagtcccaacacgcccgcctcagaatctgcaccgactacgccaacctaccttaggcccacctcggcctctcctgggccgatacaacctagacggaaaaattcatcacccgccggcttgccctcgaccaacattctcaacagacg

SEQ ID NO: 3199 - DNA, 25139 bp, Xanthophyllomyces dendrorhous
caaggtgaccgcagtgacgcgtgcgctcgagggggaggatgtgaacgggcttggcgggacggacacggagaccgaggtcgaaggcttccggatctcctttcacggtgcgttcaataagtggggctctcgacctggagtcggttcaccaggggctggatcctctggcagccgacgaagctcggttattcaggataagattgagttcaggcgagaggcaagcagtgtgattcctcggagacaaggtcttaacctcgccactggccgagggaaaattgtccttcctgctgaaggcgaggacgtcatgctcgagcacgtcaacctggtcgacgacggaccagagaacggcaagctgtcgctcaaaggaacagtcgtcgtcaggaatatcacctttggcaaatgggtcaacgtcagattcagtacgtctctcctcgtttgactgatttctcttttgtttcctaatccagccttttgaccggtctcgttctattctttttttcgtacctttagcgatggatgactggcatactgtctccgaggtcgctgcttcccactcagtccacattcctgctacttctcttgggcctgttagtagtggatctcaaggatgggatcgattcaccttttccatcaagttggacgatgttcgacaaaaaatcaacgaaaagactctccttctcgccgttaaatactccattgacggtgggcaggagtggtgggattcgaatgcaggtgcaaactatcgattccagttcaacaagcagccctccccgcttccctcgccctcaattggcggtccaaagagtgtttctagcaagcctcggaagacctccatggaaggtagcgctttcttgcctctgttagaatcccaaggaattagtgttcagccacactatgctcctgggacatcacccatcaagaagccagccagcacagaatctcatgcttcgcccaaggcgcccacaaagtcggccctggtaggcggatggccgttcccggtatcatcctattcgtccacagctacccataaggctaagcccagtcctggaggaggtgttcagaccacaatgtctaccagtccctcacacatcactctcaaaaactattgtcctcccaccaatgctttggatcacgatcgaccctcctcgtcagcttccgccccttctcccaacgttctggccgttcctttcgcccagccaaagaaggtatctccttcgccttcgggagcatctactccaacggccgatcgaccgggtttccctcgaaagcgaacgtgggatcgagaggtcactccgttgacccatccaaaatcagtcgagtcgacctactttcttagcccgacaaagccacgatcgggtgtgtcgtccccgccgtccagaccttcggtaattgcttcgtctcctcaggtcagaaagctcgctctggcttcttcaggcttgcctagcccccctacaagtgccgaccagtcgcctcctagcccgggtcctagtcctttgccagagactccgaactctgccaggttagagcttagtcccggagtcgttccgtttgacctgcctacccagccgacaatgccaacgaccagccctctgttgaaagacaaggcagagcttgatgaaaagtcgagatctgcggcggatggaagcaagccggatgaaaatgctggatcgaactatgccgatttgtgagtcttgcttggttccttcctccttctctattttacttagcttgtgcactcatagactgactggagttggtcatttctcttttaagcatcgacaagtattgcttcttccgaggcgaggaagcttctccaccgacctcggttccatcgtcccacaacgcctcaccattgagtcatccttcatatctccctctgctttcccgcaaaggacagacgttcttttctccgacctcgagcgccaaaggatctggacagtctaccccgcagcttgttatgcattccggccagtcgtcccctttgggctacggcccggcacccaccgcctgggattcagccggccttgacgttaggctgggctcatccccgttcgtcccatccgaatttggaaagggatccttatggggacagaacggagaaaggccaggcactcaggataggtcttcagaaggaaacagcaacagaatggtcttctgttgaaccaaagcctcgtgtattcttcttctttcttcaaatcaggcatcatccagacgatagtctagttcgctctagacaccatattttatgctccttccgctctggcgggacgatttacccttcatatgtatagctctgcattgtagccttctctactttatcctccttacatcataattttccaacttcttttccctctgtgtatggtgttgcctatactattttttcttcaatttcaacatttactgttgcgtttctctcctccttatctgggcatcccgttgtttgtttgtttgttttttctttgtactgtttccttctttcttctttttctcttgttctgcgtacatagatctctcctctctacttcgttctctcttttctttcttcctagctgtaactacatctttcagatcttaaatctttctcctgtttctcttcttcatgtatgtacgtacatttgtctgttaatacatccaccctatcttgccttgtttcttatcccattctaactcataccgatcatacatcctacgttccttctttctcatccatctttcgctacccgttgttcgaaaacactcttttcctttttcttagtttttctcgttccgtgctgtgagatcgaatcatgacgactctcatgaagacaacctgaagtcaaaatgaagcaaagtctcaagtcatagatcgcaaactgaagtgacctcctctttctattcgttctccccccttttcccaagtaattcggtcacaccgtctacgatcagtctgggaggataatctctctcgattgaagttcaaatgatccgaccctgacgtttgtctgtttcattagtttccctttggtttccttctttctttgcctgatcgtccgtgattgtttcctcgttctcgacccccttcggtgttctcttcaacagagaagaagagaaaagaacatgtagatggagaataagaaagcaagatgtcgatggaaagaaaagagaaaggaggaagaaaagaaaacatctgtgcagagaaacggggttagggagcgggatctgggaaagaatgaggagagtaaggggtgagataaagagtggagggagggggtagtacatcgaacaaatacattcaaagttttcagtttttccttcttaaattatactaggcgaaaaaagaaagaatataacagaataggaaaatggatagaggagaggggggaatcaagataggagacagagaagaagaaaaggatagcgaaagcaggcgagctgagttgatagacaatcctatttggaatgaaaagagaagaagaaagtgtatatgtctgacggtgtcgttaaaggcatgtcttgaggaaaaaaggcatacgcagggtcggtttggaggaaaacggggtatgtgagattttgttttgtataaaagataacggatatgtttgaatgggtggaagatgcgacgggttggaaagtcaagcaaggggatgaagagaggataggcagaaacacgcagaacgtctcgagaataattacgagtacgagaggtgctctttttttctctttgtaaagtgagaaagtggggcgaacacgagagaacggcgaaatgtttttaacttcctctttccaaagaagaaaagcacaggtccaggacagaggaataagagaaggggaagacaaaatcgatcatccctccctctacatcgtacaggtcttgaacagggtcgtcagctctggactcctcgtcacgaactcatgggaccagaaggtgggcaacttgagcatctgaatgaacgtcaccaacagaccccaagggtgaggtctagcgacgaccactcgttcaagcatgaccctcgcaatgatctctggtagtttcatattgtcccctccgccagaggaagaagtagaggtaggcgaggaggaagacccgttcgggttcgggctcgattgaacgggatgaggaggagagttgaacagatggataattaggtgggagaagaaccaggtgtgcgcatttgggtatcgaagatgactagcgatcgacgagatcaaatagtactttccttcggcatcgagctcagcagccaacaattcatacaactttgccactggcgacgcggtatcaaactcaaagtttgccaaaccctctgcattcgttgtcgccgctaccgcagaagacccaacgaacaacacgacggcgttcaagaagggcaggttgtacactagaccgttcgatgtggcggtcatggccgccaaggacgatccatccgtttggtttgctcccccaacaggagtaacgattcgagctctcaaagcgggtaccagggccgggacggacctatccgagtagacgcaatcctccaacgccgctcgaagttctctagactggagtactgcgaagtaatcagacaggatgacggggacacggtgtttttccacgtcaccttcagcaaagtcgtacaggaacgggtttgggagcgaatgctttctagggaaagcagcgatgataacatttcggatctggacgcaatgagcgggaatgacgtctaggagggagtgatagtactcggcaaggaactctgggaaatcgtgaagaaggacaaggatgattcgcatggctcctttgtaaaacactcgggaagcctcctgcatcttggtcgaagaaaggaagggcgcgaggaacttgaacatggacaaaagcaaattgtgatactcgggccaacactaaatgcgatagaagagaagcggaaaagagcagtaagtacaaaacaaggtcgaactcaaaatgacgcaaaaagaaagagacgaaccttctcttcgcttccctgaagcaacttaggcataaagtgacggtgagatatgagagacatccaagagaaagcaaatccaggaagaagggtgggttgcagcatgcttaaggtgttgctgctgaacgcctggagacaacccatataggcagcggtatggatgctaggttcgatcgagtaaagatcatttaagatgctcgagaagaatctgaagaaaggtcgttgatcgaactcgtgttggaggtcttcatgtgattgaaccaacacaagaacgacgatcgagaggatcttattcaagtatctgattctcgactcgtccacctctgctccgtttggatcgccgtagtttttgagaagcaaagtgatgatctttgaaagagcgtccatagggatcaatgcagctgcgggttcggtcaccttgagcttggcgtaaccctcgacagacacctcagcacaaacacggaagaacaaaaatgtagcgtcgtcccccttcagaattccttgggcttggaggttggtgacgattccaacgaaggcttgttcggcagaaggagcatgctggaacattcggacccattcgagaaagtagaaagcgagtcgatctcgaagtccgttatcgtcgacacctacggcatgctgtccactagccgttggctgagcattcccagcgatctcttctaagaaccgaatggtagcgtcagaagcttttccagcttgggcagctcgaccaagagcctcaatacagtgtccaaactgtgctcggctggcacagggcttctcactcaataagcattcccggaggaactcaaccgtaaagtcaataacactcattctgagatcccggagaatgaagcttgatagctggacgtcctgctcggctacgttgatcaaaccggctcgcaacaaagcgacggtcacagggacgttgaacttacgctagatttataaagagaagggttcaagaaccatcagcactgttccctatccaatatttaaactaagagctaagatgttcagagagaaagacgcacctcatcctccgcatatatcaaccaagtagaaacttccttgtgaacctttgagaacgcctcacagagtctctgcaggatagcgacgtagacttctcttccaagcacagaatccgtcttgaaaagcaactgtacgaccttctgggagaacgacagcgcagtctcgtccctgttgacagattgagcggcgacaagagggatctgtaggatggcctgtcgaacatcatgggtaggtgtcaaggctgagagaccaggagcggtcgattgagcgaagaacttatcgagctcgagaaggagaaggttaaatttggcgattgcctgttccgcgtttgatccacccatgctggtggtcggagctgacgctgaattctcgagcagggcttcacctccgccagaggagggagagggtgttctgtaggtagctcgaccgccaccgctgacaggtcgagtacctcggtcgatgatgccagctctctggactttcccgtcgatgactgtcaatgatatcaacaaagtaagaagagaaaagaggccctggtcagaacctcttctctaaccgaatctacagcagagagaacaagagaaaacataccattagggagtcgagaaacgattgcaggagatttcgccctaccgaactcttcgtaaacctcgagttgctggaggagaaggccgttgggtcggatccgaagcatatcgggcaacatgttgatgttgacagaagcctgtgtcccatcccagaacggctggttcgtacgttgctatatatcaagagattgagcagaaagaataagcacatgataggcgaacgagttgaagaataaagctgaaaacaagacgcacttctcggtgttttcgtcgaagagcaaaggcaggcgtcaatgtctcgtccacatcgtacaccgccttgtcctgagcagctttcttgataacggacgctgcaaggtctaagttacaggtcaccacagcaacaaccgactcggatggaattgaggactttgaaatcaagatcgaagagatgtttagcaaaccggggtaacaattcatgatcatgactatcacgcatcgcaaagaagaaaagaatgaagagaaagatatacctcgttaaacccgttctgctgcaacaacgctctgacactcgtggtgatgctggttctcagaggttcttttgaagtaaccatcgccaagtttccagccaggttctgaaccatagaatgagcagccttcctcatctttgactcgtcgggctccatcgcaaaatctttggtaatcagatctctagaagaaattccagcaatcgtgactgatcgttcaaccactggaacgacgatctccctgacagcgcgttcgatggcagtatacacaattcgtttcaaactagcgtttgaactgaacggagcggtctccaaggggaaagacaagaaggagggaagttcggcgataagttcatccacctttcggttaagagcagcttgagcggcagccgccgcggcctcggtctggtacaactgaacggcagacattcgttgagacgcgtcggtaccgacgcctcccgctcctccgccagcggctccagcagcgtaacctccagggcccatggagagtcgttcaagatcttgaacgagtgatccaccgggcaaaccggaagcagcagcggcggcggctgtcgcagcctggaggatctcggccggtcgatctctgatgatcgtagtgggtacgaccgaaccaagatcgatctgaagagtcttgcaaagaacttcgatctcgaatttcaagttcaacttcaactctgccgtttgatacagctctaccaacaacctgatgaccgccatcagccaggggtttggtggcctaaagatctttgagtcgatgcattgttcgaggattttgcacacgaacggaatggctacgatcaaccgttttgcgtcgaacccttcgaccaagagatccttcaacgagagatgtttgaatctgatcggtttgtcccgagccaaggtcaacctaccaagccaagaacctagattcttcaacgtcgatcgatcctgagcctgagttaccgtcttttcagagttcaacagcacaagcgccttggcataggtctcgtacaacacgtgttgttccaacggagctcctcggtcgagtgactgaaggaactgcatgtagagaacatggttgtttggctcggccgacacccgagcggtgataaaataatgggcgaaccaacgggaatgtctaccctggaaggcgtctttcatctctgccacctttgtttcaaagttgctgggagcaagattattcacgataaacaaaatccgatctgatgtatcctcatcgggttcttccatccgttccgagctcacatcaaacgagtccaggtcgagcgccttgaacgtcggtgggggtggaggggcctcggcgatcgaccgaccaccaccgccaccaccaagggtaccgtcggcatttcgagcggcatgatccatgtcagccaacgtcgttctgacaaactcaattagatgaggatgactgtcatgcaaattctgaatgctgagaatggcctcgcagacttctggaaactcgtgcaatctggattggaaagcttggagggcggtgataccaaaggtgaagttcgagctgacggcttcaggaattgacttgagcgcgtcgatgacgaagcgaacagcgaccatgagagggattccgtccaccaactttcgaagaattaatgaaccaaacagctggcccgtcaacgagagctctctaggcgggtaggtatggaagaacttgtattcgtcaaatagagtatagagcatgcagctgaagatctgctgtctttgttcgtccggtgagtccttccaggcgaccagatggctgacaacggtctcgacagggatactctccgcgtcgtggtacatctgatggtaaatgttatcgacttcagcctcgatgtcctctgggaaagtggcgaccgtctctgcgtgggcatgttgtctgttgggaagtatgttcatcagtcgggggtatagttgaagggaaagaattcgaagctcgtcgagaccggaggtgtcgtctgcagtgccttgatggggggctcgatcaagttgatgaagaaggacgatgagagtatgaggagtgagagcgaccgtttgagcctcgctatcctgtcgttgtcgggcgagttcagaagtgaccttgtggagggtaaagtcaaacaaggccgaccggaactcgtttccttcaacctcatccacttcggtaagccactgtttattttatatccgaacaagaacaacaaatcaatattggcgatcaactggttcttgaaaacagagacttggtccatagaaagaaacacataccaattctaagtcagacagctcagtcttgaacgctagacaggccacgtccaaagcgagtgcaaaaggtcgctggccgagcacggcatcgacggcctgcatttttccagagtgaaaacaacaacgttagcatccaacccccaaggggaaagctcgttccaaatatcaacgaataatggagggaaagaaaagaaaccgaccttgacttgttgggcgacctcaaagataccggtgacattcatgtctgacgtagcgtagaccctagcaaagtattcgagcaacagatcggattccacctgccacaatcggagaaagaccactaaatgggtggcatagtgggcaaagaacatgttgagtagtcgggagatcagatccgcatgaggtgccggccagggtttcttcacaggttgagaaaaggacagaaggagggatgaaggtgcaggccagcacaagagttaggtgacatgacgatacaaataattgaaggaaggaagaaaattctgtctacataccggattcatgacgagaccgagaaagacgagctcgattctggccttcattccgttctcgatgatctccttgctcttttcgccaacaatctcgtcgacgtcttctcgtgctgctttcgcacagagctcaaagatctccaacgcgttccactgactggtagtgatcaaaccgggggcgtcgttgacatcttcgggggagagaatctttgtcaacgttgggagggccgcgaggttgaatgtgtctgggggcagagagagaagagcattgagtagagttagttgtgcggccggatggctcgtccacagtgggctcgacggggtggacggagtgagaagacctcggatgggcggtcggctcgattgggaagggataaagaggatcgagacaaaaattgaaaacaaaggtggggtgagcagggcgagaggtgagggcaacgagtcgaacgtctggacgagggccgaccagtcgatttgtccggttgggtccaagctgtcgatcgcgcggataagagaagctccatcggggggaacaactctggttggatctggtccgtcgagcaaggagtgaataagtccattgatgagagtctcgactcgggtctggagcgtgtcttcctcggccgaagcccaccatcgttggaaaacaactcggagtgctcccgggtcaaggacatctctgccgagttcaagaaggaacgagtgaagggcgatgtttgggatgggaagcgggatcgagccgagggaggaagcgatgaacatagggccaaacttgagggccaacgcgtggaaaagagccatctgttggggagcctcgagcaagagtggctcgagtggggagagcagggtggagagcagcagggtacccataccgggactgatgtcggcatcgtcgtcgaaaaagccggacgggccggaacggaggacatcgatggcatgggcgaaggagtctgtgatgatttgtctggcaggttcggccaatctgacggatcgagaagagatgatgcctgctccaaaggtgagtcgttctccgggtgataggttcaatcgggataccagtagcggtagggaaagtgttcgcgatggatccgagtcaggagcctgatcaatggccgtcgcgaaatgggatgctgtgacggaaaaattagggaagaagttcagaagagatggaacaagaagacaggaagaagaggcaaaaccgggaagagagagagaggaagagatatcagaagagaaaagaacaagggaggaagaaatgaagtgaaggaaaaaaagaagagagacatcagggagaaggggaaaacagaagaaagaaggagagaggtaggaagggaaggaaggaggaaaaaaagtctgacaacttacacaacacaatgtctctggcgactcgtctaccctccaaggtcatcaacctccatccgactagattctgagaagacccggttgggccagattgaagagcggcgatgttgttggcgaggagtctgcgaaggaagtattggtagatatctgggccgtgatggtcgctcaacgctctgatctcaccaaccctgctaccaaagttgtcctcgttgatgctgctgagaagaaagacgatctgtgctttgacgatgccgagcagattcctgtcctctgcccgttctctcgtgccggatggattggctgaggtctgaccattaccagaagcctggacggaagctgacgagttcgagatggaggcggtcgaggaaggggacgaagacgcggcgggggtgacagcagaggatggggccgcaccggacaaccctggcggaggcggaccccctaggcccggcggaggggcgagtcctgggggaagaggcggcagcttgggcggagggaagaagaaaaagagggtggagaagaagagtccctatcgatgagggaaggcagaactgaggatgggaggtttcaaaagtatgagattaaggaaaggtaaggacaagaggagaaccctgggcttgacaagggagaaatcacaaaagaaaaagaaaagtctgccaaccaagaagaaaaggtcaacgatgggtgtatatgtgtgttgcctctgggtttatgtatagcagatgggaccccagggagtgtgtgtgtgagagagtaagagagagcgagggggaggaaggtgagtgaacgcaaggaggagaaagatggacgaggcgaaaaaaaaagagagaaggcggccgatcgaagggaaaccagggctgaaaacggttttgtagtgttttgtaggaacttattaggaagcgctgtagtcattttgtggtacttttgtagtctttcgggaacaccacggaacgtgactatatgcgcatcttgaggtcaacacacatacatatatcctgtaaggcatcgtactacccttgttgagatcatcgtgtgaggtgctgtatgcagcacattgatgatttgtgtatgagagaagagaaggcagatgatcgcctggacggaaacgcctgatgtcgctctgccttctgaatcatctttccctctcatcagggtgagcaaagatggccatcatcgtcatccagatgctggccaaggcagagagtacagatattggaagatcgtacatgctcggaacatccaacatgctgcatacgctgtacgtagtagatgcatgcatatgttggccaaacggagtagacactggacaacacacagaataggcgaactacaaaccgttatagtcaattgcagatgattcactatagatcgttcactcagacactactactacgactactactacgttcatcatacacaaacttccaccttcacccaaaatccatagagggaccatgttctacagcactttataaaccctactctcgccatagatatcaaagatgtcgtacacaacacccgtaagagatgatgactgcaacgcgctccagagttcaccacaagaaagcccgccctagggatgaccccaagggcatggacacgtgtctgtggcgagtgtagccaaacaggctatgcagagctccgtgccttgatccatccgtaaccaatgggcccccatcggccctgccgtaaccgcgtccaatcagacctcgtccttcttcttccttccatcaacgagcttcaccaaagaccaccacggatcttccatcgtttcattcagatcctcagacgctctctctccccctctctttctctactacacatactcagagcctctcgtccgtgttcacgtaatccaatttatcatttgctctcatgctggccaccactgcatttcgtaggctgccattcagacagccagcatcgatcatctccaggtcgatcgctagctctttacctgccctggtcaggaagcctacctttgaacctctcatctgggagagtgagccagagttgccgactattgctaagaagagctcacgcaccaccgcgtctcacacggtcgaagggtcagtgtctgattcgcatcttttctcgccttcgttctcgccttccacattgttttcttccctcctctctcttacgtgtaatctcccgatctcgtctcgttgactttaccgtccctcctctcaatctcatccagacttggtaaactgtcggctgctgagcttctcgaagagaccggcacccgagaggatcgaaagatgcgtcactttaccgtcaactttggaccacagcatcccgccgcacatggtgtcttgagattgatcctcgagttgaacggagaggtatgtgctgccgtgttcttttacatttgtcgtacctcttcttctcggaatgaggatgttctctccgatctcaaaccgggaaccactatttctcaccgtccatcatctgctttctgttcaaataggagattctacgagccgatccccacatcggtctcctccatcgaggaaccgaaaagctgatcgaatacaaaaactacacccaggccttgccttactttgatcgattagattatgtatcgatgagtgagtctctctcccggctagacatcgtcttgtcaaaacttactaccggtgctcaacgacttccttttgacattcttctccttgccttcctggtcttattctaccctcatgtaccctcatcacatccagtgacaaacgaactctgctactcccttgccgtcgaaaagctgcttaatattgaagttcccgagcgagcgaaatggattcgaacactttttggagagattactcgggttcttaaccatctcatggccgtcctcacccatgccatggacgtcggagcactcactccgttcctttggggtttcgaagagagagagaagctcatggagttttatgaacgagtgtcaggtgcccggatgcacgccgcatacgttcgaccgggtggagtcgctttcgatctccctcacggtttgttggatgacattttcaagtgggccacccagtattcgaccaggtcagtctctgctcgttttttctagccaggccgtgttggctctatctcgttcttccttctcaacaagcttctcttttttttgtacatctcatagactcaacgagatcgaagaggttgtaacggcgaaccgaatttgggtccagaggactagaggagtcggtaacgtcagcagggatgaggctcttgcatatggattctctggtgtcatgcttcgtggatcgggtgtgccatgggatatccggaaggttgccccatacgacaagtatgacgaggttgagtttgacgttcccgtcggtgtctacggagattgctacgatcggttcgtcaacttccatcctgtctttttctttcctgtgggggcatgggttcttcttgctttcttgacctaacaacgagttctctcttcttttcattacttctatagatacttgtgccgagtccaggagatgcgagagtctcttcgcatcattggacagtgtctcaacaagatgccactcggtgtagtcaagacggacgataacaagatcaccgctcctcctcgtgcggcgatgaaagagtcgatggagtctctcattcatcacttcaagattttctccgaaggatactctgtccccgctggtgagacttactctgccatcgaagctcctaaaggttggtttccctttctcgtcttttctctttcctcattcgtccttcttattgatctaacttgcacgtacacgccctctttcttctaggcgagatggccgtttaccttgtctcggacggatcgaacaagccatacagatgcaagattagagcacctggttttgctcatctcgcaggtctcgactttatgtcgaggcactcttatctgccagacgtggtcgcgttgatcggaacgatggaccttgtctttggtgaggttgatcggtaacccacaggtgttttttccttgttatccgtttcttttttccactatcacattgttcttttacctttcttttcttttttatcttgccttgtatgttctctatctgtttttctgctccttcttcatttgttgttaggcattttcaatgtgtgtgtaacttgttcttcacttcccccttgaacgtgacgttgtagtcttttcttctccttttgtttactttcctgccccttttgttcattacttccatcttctttccatccgttcgatctgtttgtattgaaaagatcagatggcatttgaaagaagcgcaggaaaccgtctctttcaagatttctttttacatcacttctgcctgctctgctagagattctcggagtgatgaggagaaaagccagaacgaaacgagagaagagagtccatatcacatcacatcaacgaccctcatggacctcactttatccctcaaaccaatcaaccgatccgccagccgatcagtctctctcctctttgattccctctctcgttccgaccttacacctttgcccatcaagaatacaggtggattgaggcctggtcgaggactgacaccgggactagaactagcggtgagctcgtcggtcgtcgcagatggcacggtcgatacggcatgcgctcgtggttcagtgtcccgatctttcttccctgcactgccctcattcgtagtctcgatctcggcctcgacagcgctcgttgcagcagtgggagcggtaggggtggagacgccgatccgacatcggccttgagctcgagtcgcagtaagatcgacaacgagtgaattggtggagagtgacgtgatcgcctttaagagcgtcttgctctctgctcggagtgatctgatcgactcggtcgtcaacaccgagtcatctggagtgaatttattggtgggagtatcggcagaagcggaggtcgaggtaataccttctacgatgggttctatcgttggattgtcgagtgtttgaaggtgtgatcgagggtggagggaaggaagggaaggaagggaaggtagagtccgtaaagtcttgagcagagtttgagatttcaagaaactgttttcttgacggatgtatcgaacagtggtccgtaaggattcgatcttggtgtattacaaaagattttgtgatgaagaagagaagtgagccaacagaaagataaaaatcaagagtgtaagttcaatgcaaaaagaaggggatggcaaagaaaagaggagcgatgaaacgaacctggtcgatgaggtagtgtgtttccaaatttccctcgacagtcgtcatctctccttgtcctactcctgttcctttcatcgtcgattcttctacacgttcatttccccaagaatcaaaaaaagacaaacacaactttcggtttcttgccttgtactatgaagagaaagcagaaagaaatggaacgcgtacctccatgaacagcttgcacttgggtctgcttcagctttgtaacatccgcctctgccttatctagctcagcctgcatgagttcgattgcatcttctaatgccctttcatgcttcttgactttccctagatctatctctaatccctcgatcgtttcggcctattcgtgaaagaaggaaacagaacatctcgagtcagtatgctggatacccatgaaatctaggcagccggttttatgagacagacctgttgtttggctgtctcgacctttcgctccaaaacctggaccttgacgtcggtttcctgactcaaacgctcctatagatgatagatgaaagattcaaatgaaattatcgaagggatttcagttcgaccaagaaaatagactgaattcgagaaggagaatagagagactgactcgtttcttgatctctctcgatagttcttgaacctcttcgttgaggcggacacacttctgctcggaatctgtgttgatcatcgcctgagcggccatcttctcagctcggactaaccaaggtgcgctactcgagacttttttttaaatccaaagagaaaaactgtcagtcgagaggattcttgatgtgcgcaatatttgatggacttactcttgatggcattctcctgctccatcaacgtaggcaagatggcagccgcttcttgtccaaggttggcgatcaagccagcaatgacgtcccatggttgacctacttcacctgtcacgttgagagtcatgtctcggagtaatgagacaaacgtcgacagttgaagagtcgatttagatgatttgatctcttccacgtgacctttgatctgttgagcgagctagacaaagtaaaagtttgatctattagtgctgattctgcttcaggcgccgtcaaaaggattagagtgggcggacttggatggcaaaatcaacagcatttgagactcgagtaaccagagagttgagatggggtaagagtgtaggctgtaacgcagacgagctttgaacaaggtcttcgactcgttttaccaatttcctaaggagtgatcgtcggtcctatcagtatgtcatcttttgctcgtgtctgagtcagattaaacagcaacttacttggaagccaatttaacagactttactaactcaaagaggtgatcgatgggagcatagatgacctcatttaagctagtagcacccgtttcaatatgaatctcggaatcttgagcggcagtgacgatagcgtgcttggcaaatccgacagcggccaaaaaattgtcaagatcgtagtcgaaaccaagaaccatatccagctcgcgttctccaagatcgaggtccgactgattaaagtaagcctcttctagatgttcatactgagcgatatgcctgttttgtcaagcgattgtacgtgcaaaacgatacattcgagggttcgcgtttaggtcctggtggaggcattgtttctatctagtaagaacaaagactgacttgataagatcacccatgcagtccgtatccttgaactcgtcctttcgaagaagttcaatgtatccatccattcgtttctcaattccagagagctcgtggtagactccacaaatcttgacatagagctctggagagcatcgtttaagaatagcagcgaaccgtctgttgagtagactgaagtgtgataatttacctcgcatcttttccccagaaaatataaccagatgattgatgttagaaacgggaacgcatttgacacggtaagaatactattcgagaccatacatagaaagaagggggatgactgacctcgcaggtgataaccagagtgtcggatgaagccacatagaggtcttctggcagattttggttttggccaatgatagagttcatcagaagggtcttctgagcgagccgatcgaagaagaggacgcaattagtagcatctgcatcaagctcgaagtagggctttggaaggtaggcctatagatgatgaaagtcggatcagtcgtgcgggcatagaaccgacaaggaattcgcaacatacctgaaggatagagatatgctctgatgcctgagcattttgaaatttcagcaggtcaagatcaatggctttcgactgtgctttggccacagttgactgtaacttgaggttctgattgaggactgattgggaatgagaagtcatgttctcggttgatgattgctgagaaacctgtcgttctcgtagatgctcaagctcactactctcgccggtttcagtttcgacatcaaataaagaagcaaccgccaagacgagatcaacaactctgctatctgacgacgtgttccaagcagaaagacctgcgcggactagcaaacggataggagcacttacgcttgaagctccatgactaactcccggaattgagagatggttccttgatgatcaactaccagatcttcaagatcctccgactttcggacttgttgcttgtacaatgattctcggatatctgtccaaaagaatccatcaaccaaatggaaagtcaggtcagtctcaatcttctccaattatgatgaaagggccaaagatagagaggttttaccaatttcctcttgtagttgcttctcggtctctacatgattttcttcaagctcatcattcaattctttaagcgcttccaagtcttcgatcgtgattctcatttcctccaatttctattagataaaaatcaaggaaaagagagggagcaattgaacccagatgatgaatcagcacattatcgacaccgatctaaatggtcaagtattaaagaaatccgaaacatacctcgcccatggccaaattctttccggtaagcaactcgagcatctcctccgctccgagcgcatcatccaactggatcttgagatcctctacctggagctctgcattttccagactattctttactaactcgtattgagcttgtttttcgataagaatgcaacggcattcgtctccatccggtcagacgttgtcttcttcaatcggaaggaaagggagaaaaggggacagactttgcaaaccagcagtctcggataaatccttctcaagttctgctatcttcatccggttttctctgtctgtttcacccgacaaatcgcgtagcctgatgtaatcaaattcatcgatcagtgtcttatttcaagttgttcaactagctacttgagttttgaggatagagaggaaaggagcaggggcaggagatggcgacgtaccgaagaagagcatctttgagtcgatcgttatgtttttctagttgtatgaaagctattgaggatcgttcctctccagacccgacatcgctcggaggctgttcgtactcatctgaagcagaacaaagcggagtgattcacgatcgttttaagttacagacgtcagacaaagaaattttggatactagggacatgatgagaaaacaggataaacgaaccgttccttgctttgagcgtctcaactgccacctccagatcaacgactctctccttctcgtgctctaactctagctcgagcgactcccctcgttcctccgccatttccttatcgagagtggccatctctaattggtcgttcgtgtcttgtagacgggcttcgagagaggcgttgtgcgattgaagagcagtggtcgtcaggcggaagtgtgtcagctctgtctgaagcgtttggatttttgctattcgtttatcaacaagaggagctaacagaatcagtactctcactctcactcttctctacaacaaacagaacggagaagatcgaaggaagacggtgacatacactgcattacccctacagctctccttaactcatcgacttctctccctttcatctcggccgcccgtaacttttcaatctcttctcctctcttcgtctccacaacccttagcttgatccttaattcttccattccttggtctctgataagtgtcgtccgatgaaccctgctgctctctgcatcctccgaggccaacgcagactccattggaagaggcaccttcggtttcggtggtgaaagtctagaaaatctcaaaggttgtgtcgaggatgatgatgacgatgacgggtcgttcgatgattgaggtagatatggaggtagtgctgataggcctctcgtcggtggtggtaatggtaattcatccttctcaatatcttcggttggttgactaatcccaccgactctaggtgtccgtttgtcgttcatctgcccgcgcctatctgcagagttctctgcactatcaccatgcccttgctcttcagcttcctgctcaggttcggcctcctcttcctcatcagcactcacaacagatcttgtcggttgacgatgttggttctcgtttggcctaatgctagggtatggaaccgaggttgaaccgatcttccgggtggatcccagggttgttttagtcgagcttgaaagaatggtcggatctgatggtctcagacttgacttcccgataggcgtgataggtggagggagcggactgatcgattgtctggattgctgcgctgttgttgttgtcgccgccgtcgtcgtcgtcgtcgtgtttgaagaaggtaccctaccgagcgcgctgctcgaagatggacgagaagaaagagtagatgcgcctgtggctgtggttgtattcgtaggcgtaggtggtatagatggcctagacgccaacttctgaggtgatcccgctcgactgataggaccagagttcgatgttgaaggtagatgagatgactgtctgccaatggcatatttggtgttgggagtcgaaacagagccggctatggaaggtcgggaagaaggtcgacttcctgtggtagacgatgacgcagacgatgatggcctggactgcttgtttccccatccccagacggagcaaacaaacaaaaagaataaagaacctgagcgacgaccattctgcctagtacagtcgcgctcgaaagaaagcagagagaatagggaacacatacgagtggtagcttgataaccgtcacctgcgacggtcgaacgaacaccccatacttttcacgacacgaaaagtaactctcgccagctacacttccatcgttcttcccatcaggtccgaatcttcccatgccccatacccggcccaatcccaattttatgtcagtctctgtaccactcgaaccagagaacgtgcaacagaagagagagcaagttatataagtagaggtacagggagtagtaaagatacatacagctcaacaccgacccaacgtcctttggcaaaggtaggattcgtacccgtccatcttatgattccctgtccagcagaaacagtgacttgagaaccgacgatcagatctgggccttgaggcggtacgctcgagatgacagaggaaggacgagaggccatctattaacacgtccgtgagtgtatgtatgtgtatgagcgaatcctcgtagaagggacaagtaattcctcgttctcgtccccgttcctatgacgaacgaataagggatatataaggaaaccctcccgtattcaaggagcgtatctacctatctgtttatccggctgactcggtatccgacgttggatatttgacgccttgacgtgtatacgtatgcgttgggtcgaagagtcgttggttcttgaggttgtcgtcgttgatggtgatggtgatggtgatgttgacaatcgatccgaaccggaccctctccgacgattcaaaaacaaaaactcaaatccggcctgacatccaccatcctatccatcaggccttctcgcgctttcctcacgtcctcctctttcatcatcttctcgccttgtccgactttgctgatgtttcgatgagccttgtttcttcaagctctccttctcagtattctcaacaaattctcagttatagccaagggtgtgtgaataaattgagatagatagaagtacaagaaacggatctaaaggagaaatagagatggaaagatttgtacacaagaaaaccccactcgcttctagccctcagccttcaattttgatagactgatcagaaggaaagggccagagtgcatataaaaagaagaaagagaatagaggatgagtcatagagagtaacgaagattaactatagacacaggaattaaataaagtgtaggtgtgaatgtgaatgtaaagcaagacaacatggatgaacgaaagaagagggatcgttagagaaacaagacattttgctgacagaagggacaaggtggaacggggaagggctctaatggccagaaacaaaaaagaagaggaacaaaaagagcaaaagtttacaaatatactcgttcttctcccataagagatcagttcaagggggaaaaggaagaaagaagaaaaaatcatctaagaaagaaaaagaacacactaaaggtgaactctagagagaaacctttcgttcctctccccagaagatcccggactcttcaaggaatccggctggcctgccagcggcagtccctgtagacgtcccgtttgaactccaaccggcctgtttcccagggctgtattccataggcgagcttggtcctgaatgaagcaactgaggtgtcgtctggcctgaagacccagaatgagaatgtgtgccactgagtgcaggcgagaagaaacctgaaggcccgacaatccgtttaaaggccgaactcgagctaactgcagacggggtggtcgacgcgtacgatgaggccgactttccggtcgatggatcgtacaccggtgacatcgagcttgacgtggagagggatgaaggcgaggaaaactgatcgcctctatagaaacagtacttgtcgatgaaagcggcatagccagcggaagaaacttctgccatttttccaacctctaccgccaaccttcctctctctcccggtgcggccccaccggtgactctgacaggttctcccagaacgacgccgacgtcggtctcgccgtctgtctgacgttcaataggcaactcggcggacatgactcccggactagattccaacaaggcggatgtcggtgtttccggtagcgtcgggctgaaactcgggcttggggaagacataggcggacttggcagatccgaaatcggtccggtatatgatgacgatgacacctgcttggaagataaggaagatggtcgggatcgagactttgtgggaggaaacgatccagcatggttcataaagtacgacgaaagttcgttcgactttacctttgtctggggcggagcctgtgtggccaacgtatcggtctgatcccatgttttctgtctggaatgactcggcctgacggttcttttgcccgatccagagggaaggacaatggatgcagaaggaccgctgacctcagccttcggcgtgatcgcctccttctccagacgagggggacagtttgtggtaggagtgggagtagagacctcaaatagaggaagaggctcatcatttttcttcgagggcggagaagaagccgtcactgctgtggtcgttgatgaagttccaggaaaagaccagccggaacccaagatcggacgttgtttatcgatcacggatatgtgcgtattgataggcaccggtgccgttaacggcttttccccaacaggtccagtaaatagggtcgaggccgtgaccgcaggtatcggctgagggtttcctcgtggaggttcgaggagaggcaagaatgtgccttgttccatcaagggtctcgctctcggtctttttgggattaccgggttcggaacggtctgtgctgctgtcgacccaactatcgatcggatcaacggagacgtggtcacaaagccaaatttgtagttggatccaccattagaatcccaccattctcttcctccgtctattgagtatttgacggcaagaagcagagtcttttcgtgaatcttgggtcgaacgtctgcgaggttgatggtaaacgtgaacctatcccagccggacgagtggttaggtccaagactggacgctgggatatgaacggcatgagatgcggtgacttcagaaactgtctgccagtcatccatggctaaacagttgaggaagacagggaagtagagaggaggccgattcatcagcaaaccacgcaagcaatcaaagaggagacacgaatgaggctcaaaaaggactcactgaaccggacggtaatccatttgccaaaggtaatattcctgacaatgacgttacccttcagcaccaacctttcaaccggctgagcctcatcaattagatgcacactttctaccatgacctcttcgccttctgcaggcagtacgatctttcctctacccgggtcgaggttgagccctttcgttctgggtatcatcgcagaaacctccttcttgaggtcgatcctatccctagcggatagctcgccgttgggataactgacttgaccgccggaaggaccaccactacctgggaggaaacctgtgttggatcgagggttccatgtactgaaagcgccgtggaaagaaaatcgaaagccttcgacctcggtctccgtgtccgtcccgccaagcccgttcacatcctccccctcgagcgcacgcg

SEQ ID NO: 3200 - DNA, 2649 bp, Xanthophyllomyces dendrorhous
gtggtggtaacagtagggatgggtgagagttctctaccgatcgtcttgtccgcagactgtctcctcggaatggtcattcccggccctggcgccctcgccggactggaagacccgtgactcttggctcgtctgggtaacccgggcatgggaccggattggaaagcaggtggtgcgtcgtccggggaggcaaaccggtaggctgatctcgagctgggagaatgctggtaggaagatctacggggaggtgtcggttgagtcgggacgagcatggtgtcggtggtgatggtatcggctgtcggacaggacaaaggcacggcagagtgcaaggtcaaatctttaatctttggggatggcagaggcgacacgtagggcatgatccaccgtcaagacgatttgaaggtgaggcgtgagaattgaaggtaaggagaacaagggatgatctgctttaagattttctctgtgaacgagagacaaaagataacaccagaagttaggatggacgtccgaaaggaaagaaggacgggaactgggaacaatctgttgattggatcaatatgaacaaggacgggacggatggtcaaccagggatgccctgccgctcttggagttcctgggtgtccatctcttgtatgaagtaccaagagatcaaggatctgttcctggggtccagaaccacctgggctgttcacagttcggaccggtccgcaacaacatacccacaacacatcgtacacccagaacaacactcccacaccccttgaacacacagaggaactatgacggcctgctcttggacgtcacccgctccggccgtgtgtttcatgatgattcccgcagtcctaccggccgagcgcttccgatggagggagtttcttacgtgagacgcacagtgaacaaaaccctaattacggatcttttccttctttttttcttccccttctttttcagaactctaagggaagacgatggtccgagagacaagaggggaaacgaaaacaaggagagaaacgaatggcgttgggaatatagaaatagacagaacataaggaactcacagagagaaagagtatatgtatatgtgtgtgtgtgtgtatgcagatagatgcaaactcgaaactcccaggaatcggttctttgcaaaagtacggaaaggggaacgacgaccggattaaactggcaggattaaagatgatgtgcacgttttgcgtgcgtgtctaggtctggaagatagattaccagaggatccgtcctgtgaatgagattaggtatgtatgcaaaaagttcaagacaaatgcagcgacggaagcacgccaagatctatctacagtgtaagttggctggcacacatgtatacgcacatatccgcacacaacacgcacaacacgcacaaccattcacacaaaaacattagcaaacaacgaaggagaaagcaaacgaacgagcacttgatggatgaaaccatccatctgtacttacagaagtctctgtgatcggagtgtgtatcccaaacggccgaaccagacgatctgccttgggtgagcgtgagtgtggggaaagaaaagagaacgagaggaggggcaaacaggaacgagaggaaagaggggaaccgaccggatggaagaactggacagaatgttggggagaggccgtacgcataggcatacgcacgcgtgtgttttccaggtacaagggcaagcctaaagagacattcactgcggatatcatatgtgtgtatgtcattcgcagaatctgatcgtgttatcgatcatgatcgacatgtctgctcgcgccctgagatcatgcgcagtccccaagggtccagaccaagtggacgcaaattgctttcccccgcccggccctctctggcgctcggatccacgtaaactcataacgtcacataccttgtcctcgggtcccatctatttatgccctaattatgttacagttttgcgtgagtgtttacgcgtgtgttgtgtggtcattgtcatcagggcactcccacctatactggccctgttaataaccctaacaggatgtttctcttcccttcatcccctttcgcttttgcctccgtaactttcctccggctgttctccttgctcttccgggatgagtaaccgatcacgtgccacattgtttacattcatcaggtacacattccggtcgcacatcacacccgccgagcctcgtaccttctgacgagatcatccctctctagttcccagtcccagcccatcctggcagagacatacgttctcggtccgacttcgtagccttcgctgccccttctgatctttaagcccagtggcttgtcgtcatcatcatctccctcttgccatcgttgctcttccacttggtcctcatcagaccatccgtcgtcggctctgatggacgccgaagaagcgtgtccctcccgagatcgaagaagatcttgtctcatttcagatccaggacggtaccgactggacgtgggttggagcgcagggttcaatatgtctcggccatagacaaacccatgggatgattcggtcgttccgtcttcaatcaccctcctcggtcgagagggaacgtatgatggatcgggcggtggccaagagagcgcttggtatggatctttatgtagatcgacagatggaagaagaagaagaa

SEQ ID NO: 3201 - DNA, 45550 bp, Xanthophyllomyces dendrorhous
  misc_feature (30890)..(30899): n is a, c, g, or t
agaagaagaagaagaagaagaagaagaagaaaagcacaagaacatggcgtgtcaggattatgcgcggggtgggtttgatataaaacaatgaagagtcggggtgagggttgctatcaaggatgggaaagagagaaaggaaaaaaaaagattcaaaggggtcatccccttttacttttgtatgcggattccctgtttcgtttgttctttacacgagaacgacagagaactcaccttccgatctcctttcatcccctccactttttccactccccaaaccctcagactgcttgctcgcctacccaacttgtcgtcagccctgtctctccctcggtctcggtctcacatccaccaggtctcctccgttgaggttccgtcccaccttggagagcactcaccactgcgcccaccatcacagccgctgcacctcctaccgagcccgatagacccgaccgatcggcccgccttctgtctcttcccgtttcttttttatcttctcctagcccctcttgatctgtctttcgtcgatggaagctaacccactcaccagtcccatcggcaatctcgaaagagagcccatcgcctggtgtctccgtccacggaaacagccaagcaagaggggagctcccaagaacagaaattatgttgaaccagggactaatactatatggatatcttatgtccttaattctacctcgacggatcagtgtcgctacctagaaaaggcaaacggattaaactttgagattttggaattttcggacagatgtaaagaaggaaggctaccttgtctttctcccatgcttcgatcgtcgtcgtatttgaccagagtgaccaataatgatacattctgtttttgatccacatccatattcaactcagtcacaccctctcttgtcttttgtcctttctgcttgaacgttgagagaaaaccagagaaacaggggaaacttacgccatcatggacacaccgatcaacaccggcacgcatgccacaaagtttaacaccgtcaatacgacctctgccgctgtcggttcttgctgttttgccattaagtcattgtttttcagtcaaacagccagacttcagcgatacgtgcctgacacgtcggatagacagtggaaaagaagagaagaatacacgaacaagaaaggtgttctctccgccttgagcaaaatcccacactctatatgccatcatccagaaatgatatgtgcctgcaaaaagtttccttttcaattgtccgtcaacatacaatgttcgatctccttaaaaactattcaaaacagggccaaggcctaaagaagacagaagcgaatgacttacatgctagtaccacgtaggttagaaatcggacaaaagacgcgtagttgtgatgaccaatgcagttcgccacccacggacactaaagatgtgaacatgagaggggagaaaaaggagcaaggggctgtgagtataagaatcaacacgatattatctaaagagcataggcttcacgaacgtgatgatccattcgaagaacacatctattcatggccaaccatcacaaaacgtagggatagtatcaggcgggttcctcaacaaattatgcgagaaagaaaatgggtaacagaccgtttacatcttctgcaatgatgggctgtgaagtcccgcaagaagagcttgaatcaaatctgtcttgaggtgcaagatgcaagatgcagaaacatacctcgtggaggtttgtagacagagcatttcgaacagaaccggggaccccccgtgagcttctttacctcgacatcttccgaagagaggtccggttccttcgatggagatcatgccagtacgtaagaagagcgcaaggttaaaggttgagccattgaggaggcatcggtagagaaagttcaacggcatacccagtttggtggtattcttcctggctctgttgtcacacagagatagtagcaccaaaagattaatcccaccaggacacttcacagagagttgaggtaacaaacagattagttaaaattccttcgggagatcacacatcggatgatcatacaagaaggaaggaagtcttacttgaaaggtactagaagtcgaagcaattcgatcgaccatctcttcccatagaacggccagatgatgaaaatctgggaactatatgcgatgaacgagatcaatgagatcgcgaatgtaatcctgtagatattcaagaaagatgatcccagagtcaaacggctacctgagtttaaacggaacacatctggattcttaccatatcttttcccacttgtctgccatacagagagctgccagaacaaagttgatgacaacgatgatgatggatggtgatgatgatcaaagataacgtcggcaagaagaaaagtgaaactaccccggttgaaatcgactctcatcttcttccttgccttcactcactccaagcggtcctatcgctcctcatccatcttctcgcgatgagctctccgtcatgggattagtatgtgctctatatgttttcattcaaatccacacgcatagacatgctaatcatcattgtgtctgtccacctgtagtatcatgaagttcgtgtctcaagtttcatctctatgcgctctgttttctctgatctgttttctctgtatatatctgtcttgatctaaaactagattcgtgatcgcgggtgaagcagctacaggcaagacatcaatattgtaccgactcaccgactctcgattcttgacgacacccgacccaacaatcggtgtcgagtttggttccaaactgttacgcgtggcgcctctacctcctaaaccttcttccccttccgttccatccggagattcaggaaccggagatgtcgccagtcaagcactagtggcacaacctgaacgtgatgagaccgccgagcaattggcagcagcagtaacggtaccgacggtagagggggaaacagccgaagaagaggaagagggagccaagtgggtcaagcttcaatgctgggatgttgccgggtcaccaagctttcgaagcatcaccaagagttattaccgaggagcagctggtgcactactcgtctatgtttgtccatatatgtctaactttcgtttcggtcacttgaatgccaatgtggatgtctgactttgtcatctgatgggaccactgggggtgcaatcgccgaccaattaccacaggatgttacccgttcgcaaacgtttcgagaactaccactctggctgaaagatctccgggcgcatgcagacccatctgtctccatcatccttctaggcaacaaatcagacttggattcttctgctgagacgtcgacgacaacacctggggaggacgcgaaaccgagaagcgggaagcgggaggtctctagggaagaggcacaggcgtttgcagagagagaaggcttgatgttcttggaatgtagtgcaaagagtggagagggtgtcaatgaggtttgtctttctcttctaaacatgtggtccagataggcttgtgccgatgaatactagggtctgacagtttgtttcatgggttatttcaacaaggcttttgataaaacgggcgagtacttcaacccttcaaagtctttgatccaatctagtctggtctgactgtatgtttctataatcctatcgtttgatcaatattacttcatgttctccagctcgagaaattcttcagaagatcaatcaaggtctcttcaagggtgatactccatcatcgaaatccaaggtatgtctttgcttccctgaaggcgatgtgatcatcacctgaaatgttttgatgctcaacgatctctattctgggttgctctggacaaaccgtttaatcagtcatcaggaatcaaactctcagcaaactcgtcagctgatagtaagagccgtccaggagagagcgcgagatgttgctaagttggattcgaatacagatctgtctacccgccctgccttgtttccggtttgtttgctgaagagatggggatttaatatcagtagtagatgcactgcatctctccctttccttcttataacctgttgtatcatatgattaaatgcgtgtctttctatgttcgaatctgagtcctgtccaaccggaagcatgcctgtctatcgagtatagaagaagaacagagaaaaagagatacgagaacgatggatcttggcggaacaaagcagaaaaagagacaaacgcaaaaaatcgatcgacttttgaaattttctattttattcttttcttttcctctttctcttcttacaacccactccccttcttccatcgtccacacacacccactctctccttctttgtagccaaacatgtctcctattcttgtctgcatgggtaaccccctcgtgagtttctgtccccttgtattttgtttttgaaatcatgtcagagaacagaaaggaaagaaaagaatggaaaagagatgaagaacacacgttgatcgatcgcttttctcctttttttcctcgtctatacctcaccgttgggtgctcgataatctagctcgatatccaggtcaccaagggtgaggatctccttgagaagtacgagctcaaggccaacgatgctattctcgccgaggagaagcacatgcccatgtatatctattctcctcattctttattactttgatcaaagcggtcgggagctcaccctaagatccatctctgttcgtttatggactgtgataatgtcggtatcagctacgatgatatcgtcaagagaaaccctgtctacgtgtatgttctagttgacgtcagcgatctgtcttgtcaaaatattctgatactaatctctttatgctctggtcaacacagtgccggaggagctgctcagaacgcttgccgaggagccgctgtacgtatcgttgtcatatctaaattccttaatcagttagaaccactcatccgtctgacaaacatcttgcgtttggaacaatcagtacgttcttcccgagaagtctgctgcctacatcggagccgtcggagatgacgatctcgcccagcagcttcgagccgctaacgacaaggagggcgttcagtctgcctaccaggtcttcaagggacagaagaccggagcttgtgccgttgtcatcaccggtcacgatcggtaagatcttccttttctcacgctactttgtcccaagctgtcgtttgcattttcgccgtctaaatttgtttcatctcggtactcttatcagatccttgactaccactcttcaggctgccgagtccttcacccctgagcacttggctacccccgaggtcgaggccttgatcgaagacgctaagttcttctacttgggaggcttcttcctcactcacggaatcgagtccgctcttgttcttgccaagaagtccgcttctgccggcaaggtccgtcttttccacttgtacattgcgccttgttatcaggagatgcagatagatcctaatctttctttcgttccctttgatagtgtttcgccatgaacttgtccgctcccttcatccctcagttcttcaaggctcaggtcgaccagatgattcccttctgcgacgttgttatcggcaacgagtccgaggctgaggcctacgccgagtctcacggattgagcgtcagttatatgtcccaacttctgcaaagcggttaagtagctattcattaaccagcgtttgtttcacgaatcgacggtatgcacagtccaaggagcccgcatttgttgctacggccatcgccaacgctcctaagcagaacgcttcccgaccccgattggtgatcatcacccagggagcttcttccactatcgttgcatcctccgatccttcggttgctgctaccaacctctctgcaggtgatgccaaccccaagacctaccctgtcaacaagttgagcgacgaccagatcgtcgataccaacggtgctggtgatgcctttgccggtggtttcttgggagcccttgcttctggaaagaacttggatgagtgtgtcgaggctggacacaagctcggtcagatctgtgtcggacaggtaagtggatatcagacctgtctataagatctcacagtatcgacatttcatgatctaaacattcttattgttattcttttttacttatttgtaggtcggaccccagttcaagttccctaaagtccagatcctttaagcgcttagcttcaagattcttcctttctagatttttccccttttccctctcgctttcaacgctatcttcaacagttgcccttcttgcatcttccttccctttctttcttggaattcaagttcatctttttctaacaagtgtttgattagtctgtactaaaaaacatatatccagtcctctctgaccgctcaactcgggatttttctctatccttcttttctcatattgtcttcctcataagaaacaacatagatttctttctcatcgtttcctttcacataggtttctttttctccactaaatcaatatgcagaaagaacgatgggatcctgagacacaagtttagaacgcattttaataagaaagaaaaacatgagaaagacgatgcatagacatgacgagccgagatcccggaaagagatgaggacacaagataagaaaagaaaggctgatggaagtaagggtacgagtacatgactaaataggacaggacaagacgagatggggttgaaaaatcgatatatcgtgggagaaaacaagatgctcaaagaagttggagggatatgtatagtagatgtaaatgtaaatgcaaagtgcaaaagagtgagattgtgattttaagtgacgaacggactgtattacgctttagtaatgatgcaatgaagatcagaagatcagaagataagggaagaagacgataatcaaggtggcagctccatggagacacacggtgtgtgttatagaaagacaataataacaatagagatatagatggcaaacaagaacaagaggcgtttatcgcgaaagaagatagagaaaagcatagcaagaatgatctttcagtcgtcttcgtcgtggaagctccatccgactgtcaaccgagggggttgtccgtctcctgatagagttccttgaccatcaggaccgaaccatctgtcacattagaggaaaaaaacagaagaagaaagagaaagagaagttaagaaaactcagtaaatctcatctttacttagcgattccaaaaaggagagatcgaagagaggaagctcttgactcactcattatactcgaccatcgtatcctccaactctgccaacatcctgatcgcatacggatggagtttcctatcatatcctttcttactcgacctctccttctccttttctttttctgatgtcgatgcattctcttcctcttcgcctaacatagcgagtctctccaacaatgtcgatgctaacggtgtcaacaacgaagatcgctttgaaaacgatcggctcatccgaggtgtggccgagacatggccaggtgcgagagctaatccgtttgaagaagatccagcagctgaagagactgatgagcccgacgaagttagttgggatgagtcgaatgagtcagacacgggcgtctgtgcaaaatcaaaggagaatacaccagaatgggccgcaggggctgtcgataaatcgggagacgtagactcaggagtcgagacagtgaagacgttgtttgtggccagcccggaggatgattcattcaggggggctcgagcagatacagcggatgatccatagggccgttgattgaagttcttctgttcgatatccgagaagttggagctcaagggggatgaagaactagattcgaatgaagacctcacaggagaagagaggtcatgcttgtaagaagtcgttgtgggggctaggaagacaggtgtttgaatagggggaggaacagatacagaagttgaacctgtaggaacggatgctgacgtggaaatcatagatgagcgagtagaggtactcttggtgggtgacgcgtaaggatccgagtcaatctcaagatcatcggagacttcattgatgccatacaatgttgatctcgttggtgaaggcattccttttcctgcgcccgaccgtttcttttttgcgccgaaactcttcttgaaccactgagtcgccttgcctagagggctcgaaggtaacccatccgtcggaatgctttcagcagttagagaaagtgctcgcgcatcgagctgttccaccttggcaggcgcagacagggcctcttcagaccgttgcagtgagggttgcttgattaggggaaccatcgcgatagtcgacttgcttctatggatacccccgccaactgtctctgagtcttcaccatgagcattctgccctgacggacagtcctcttcttcgtccaagatagttcctagtacagaaggctcgatctccccgtgacgaactcggattgcctcaagtcgattgttgagaagtttgatcgtatacagttcggcctctgtcggttcactctccacgccatctcttttcttgatgtgagaaagtcggaagacaagaagccggacgacgtacgatcgaacggactgactccagaagagaacgagacgctcgaagataactggatcaaacaataggccaagaacacgcagacggtcttctgggttggcagtcagcgaatcccaatgctggaagataaatgatacacatttacagagcgtgagagcatgatctccatctcgaagaatgatctcgagagtcgacacaatgaatttgacagagaaggcattggtaggtgaggaagagagagagagatcatcaaaaagatcaggtggagcactagcaatagaatcaaggaagtcgaacagacagctaaccagttcaaaaatagaagtgcagaattgagccaactagaattctaacggagagatagtccagataaatgatagaaacactcacaagacgccctttggctcatacatgtttgtcctattgacaagcaacctcgtccagatgtcactcatgtttccccagaccttcgctccgtccgtgtctgtaccgaactccggatcaacaatcatcggggtgttcaataggtagctcacgctgtcacttaatcgtctgtttgcactttccaataccggaggtttaccaggtgaccctccaaaccctgcggtctcattcgagttgaatgaattcgtagcagcagaggtcgtcacggagactatcttgccttggacgtacgacaaacacttggtggcgaatgccgcagagatgtctaatacgatagccgacccgaagccgagatttcaacttgtattagtaaagcaagcttgaaagataggacagtcgtccgtacagatatagaacaacaggcttacgagcataacctggagatgcaaggacaactgaggactgtagcctggcagggttctcaggatttcctaatgaaggatagaatttggccaaattcttatggtatgctcggaagaaagcaaagaacaactccgagtcgtcggactgaattgatgaccaagccagaccaatgtgaatacaaagacatctcaactgaaggtatgaagaaaccggaagctgacctgccatcgcctcagccaatttcccataggaaacctgaacgcagcctcgtcttctgagtcctcatagacacattgtgttgatctgagcgacgccaagtaatcccttgggtcgtctttggtaaacggcagcaagtaggatgggaacggttcggactgatgtacataagatggtccagaccttggcggagaacgcataatcagaaaggttagtgaatggcaagagccaggcaagtcagagtgttcgacatctagactcactgagtagattcgacttgagcaatgacattcatctgtctcgtcagcgtgacgcgtgagatgggcattgctgctaaaagctgctgagcaatcccttcaattcggaagaatgaaaaagctatgagaaccaaccggaacatcacatatcaatatcttgcataacaaaagccttgaccaagacggatggaattgcacaatacctaagattcgacctccaaaactgagagtgttctgaaaaattcctttactactgagcttgttcatcacgaatgagataacagttctcatgatctttcggaacatcgcttgatcttccggatcagattgaagagctttgattgacaacacaggactgcaagtagatggttcaagacgaatcaaacatcagtgagtgagtaaagagagacagagacaatgtatctagaacaaacctctcgattagcgaagcaacagcttccaaaacagcccctctctcacttggtgtctgctctagccaaatctcctttaccacgaacatgatcaacccttcgaaataaaccgctcgaagttttttgttgtcgattactttctcagaatcgaatcctcttcgttcggcgtcgtagaggatcggtagaaggacacctcgtatgatcggcgcacggatgggtgcaagccttaatctgaggtaagcaatgaatccggatgtcagcaaatgagctctaggggacggtacagaaagagaaaggggatagactaactcttgcagacaatcttcaagtttcccttgcaaatctctcacctccacgccgttctctctccgtctcttcgctctcacctcttcggtcaggatcttgataacttctctctcctttgtctttccttctgttgccgctccagccttgcctcctaccctcttcttggaatcaaacaatccatctagtggctcatctcggtttgatatcggcgacattatttggtcgccaatagcacctaccacggatggatatttcgtcggcttgcctggaagcgaatttgaatcacgccgacgggtgagtgtcaaaggttgcacaggtgtgggcgctgatgtaggcatgggtatggttgtggacgacgaagacgtagaaactgggccgactgggtgactctgactggtcgtttctttctctctcaaggatatttctggtgggaatattgacgagagagaaggatgtgttgagttattaagggctgaagggccctcgaactgagcggatgattctcggggagacaagacggggcctaagactgtcgttgagaataagccaggttgaggtgtgattaaagaagttggggtcacactaaattcaggatcggcaggagcagcgataatagcaggaggagggagcatatacggcagagatgtaacatgatctgacggagacgatgaatcaaatgtcgttgaagcgagagaaggaagagttggaggagagggaagataggcaaaaccgaccctcctcgcctctgctgctacccccctctccacttccagctgtagatcgtccaacgctttctctacatctccttgcctagatccggcccaggagcccttgccggacctacctgaatctgctgaaccccaaatctcagaactggatttactcagtaccctccgatgcgccggccctttctttcgagatgaagatggtagtagatggctatcggaagagttgccatattcagagaggaaggccccagagaatgagccactcaagccggcattgaaggaaattcgattattgaacgttggcagatctggtaacttgaacagctcggatgatctgtttactggcttattgtctgaagagagtgaatctgttgatatttcgctaatctttcgattatgttgagttttctgttgcgatgttgggtgaagtgacgtggcagaatcggagccagggaaccctgctgatccggctgacgggaaggagggcaacgagatttgaggggatggaggagtagaaagcttaaaggcaggggtgatgggaggtactttggcaggagcctcccatgaaaacgagttgggaagagaggttggcacaccagaagaagacgaagcggatgacgtcgaagtcgaaggcgtggtagtggtcgttgctggggtaggggtatacgattgttttgatttagatcctaacgagacggaccgagtctgttcttctattccatttgagtacccccctcgttggaacattgaagggaaagcaggcataggaggaacagcatctgctttgatgccatcgcctccgggtgaccctccatctgacgcgctgtccttcttcttcccaaacaaatttctcagcacacccgagctcttttttggcgtgatctttttggttttcccgctctttccagcctttcctacagggctatcacctgttccggaccaacctaattcgtccactgaacctcgggaatattcagcctgataaaccgacggccttcctctatcgatgtctgtgctcgtcctgaccatccctagtccggccagcggcgttcgatggaaagtagacggacttgagacattcctcgaacctaatggtctgcttgaagaattggtctggatagacgtatgcggatagatggactggttcgtctgggacaagaacagaggttcttctgtcggaggagcgggtcgaggaggaggcgataaaggcgcgcctcggcccccattgggggatgaggggtacaggtgaataggtgtaccgtcttggataggtgatccgatcgaaagttcactttctggtcttagcaagggtttcgcggttccaccccaagaggacttgcgctccgttctatggggtgaagattggctggatgcatgtgtatttctccagagaccaggcgatcgagcaacttcttttccttttggcgtagactgagtcgatgggtaatcaactgatgaacgacctcgatatggttgaggcgaatcagtctgaaccataccggacagcttgtcggtcgagtaagtagtatgcgttggtgagagtgcgttggcctcatacggaccagacggataggcagaatgctgttgtttttgttgttgctgttgaaacggagctagagatgtcggcaagctaccgggtttcccgactcccagttcagagtagctggtagcagcagcagctgcatcatgcgttggctgtttgagtccggtcctaccacctattgagccatttagatgttgatctcgatcgtggtatcccgagctcttggaattcaagggtgagaagctagctgctggatgagaagctccgggtgaaggaagtccagattgatggggcgaaggagaagctaagggggttggaagcagagaggacgagccgacggaaggccgtctggatatcggtcgcgttggtggctgagagacgggaggcaggaaggatccccctcgggctgctatgggaggaaaccgagccgttgtcgtagaggcctgtatgggcgtaaccgagaggtcatgagcatggagaaagcgttgaggaagagaaagaggttacgtatgtgtgtaggtaggtaggcagacgggcagacaggcagttaggttgggcacaagaacaattatacacataagaaaccgaagagaaccccgggataggaaacagaaaaacaaagatggcagagaggacgacaagggaagaaactaagctcaagcaaggaggagttgagcagccggaagacagtgcattaaagacggacgtacgatactcgttcccctgtttggatccatgacagaggagaaggagagaaggagaaaaaggctttgagtaacctgacttgctcgcctatccgagagtgatgaacgggatgagaactggaggtttccttttttttgggtggtcgtaccgaaaacgacgaacggaatcaaagacgtttactcgcatcgaacaggtaacattcagtatagcatccatcgctagcatacacctcatctatcgacagtatacattcgtattcccggtcagaagtcatacatacataccatgcgttgctcgttgatcgctccgttgtttatggcatttctctcatcgcctactcttatcatggccggaaactctgccgacacccagcctgagcagaaacctctctcggctcctcctttgagacactcggccaactcgcctttgctctcggatattctcaccgtcgagagacgggctggtttatggttcgattacgctagggactgtagcgatgtagtgagtccggtcgtggtgatgttctgtgcatgtcgttcgactgattcatccattgtcttctcttcagatgaaacggctcacggatgaaagccagtcgaccactgtcctcgtccctgttaattcagccatcgttgctctgcccaggaaaccgttcgtgtttctttcgtgtgtcctgtccatcatcagagacggatgtgcttgtctgtgttgatctttggccattttgtatcaacaggcatcaacttcctccctcatctaagatcgagatcaaagacatatcgttcgaagaacaagacatggctcatgcttcccaggtcgagcgatggattcaaggacatgtaatccctgtacgttctctactgtacccatgttatccgtcctgactgcttcgtgagactaaactccacggattatcaatatccatataggaatctgtccccttccctcttccaactcagtcagcacctttccctacgcttcttgattcgttctcgatcagcttcaaccagtctggacagtcagatgatggagcaaagagcatcgttgtcaatcctggagaggcccgggtcgtagacgtgctacacggtagaaattggagagtagtgtttttggagggcgtcgtggccgttcccgtccaaggttgattctctttcttattcgttctctcatgtcttcacaccgttgtctctatagttcgtagatctttattctcatatatcgttctgtctgtatctctgtctgtatctcgtctgcctttcgatcttatgcccttcttgatgtatgcgagggtggtgcaaccaacaccacgtggttacgatgtttggttacgggcacgttgtccctcttcccaccacttttgggtctcccacttgaacacttgacacctaacccaccacccgttcattctccttctcccctctcttctttccctcggcctctgttctccctctgattaacacaggaaatagaaagctcgcaatctcaagaaaggaagaactcaaacagatttgtctttgcccaagatggacaaggaaatgtacaagctagaggttctctcgctcgtgtccaagatctcacaagagatctttaaccacacgggtatgtggacgtatctttattcattcattttcgagattggtatatcgacactcgttgcttgggtactgaccatgttcttcctgaaactgttcttgtctgcagctttgaacgacaagtctctcgcagagtttatcatctcgcttcaccagcaatcaaagacgttgccagaattcaagcaaaagctcgccgacgtccaggccaactttcaggatagtttcgtcgagacattggagtaagttcatattataaccacttcctttctgctcctattcttctacttcccggtggttgcccacacaagcctcctttgtctttgcaaaacacgcttggtggggaaagccgatcacgggcagagtgcacgcgttctttttggacccggatagattgtgagagagaaagagagaaagagagaaggagaccacattcatggccaaacaccagagtttttcctccaaggaaaatatgcagactctacccttcactagtgaacttgttctctaacgttgtgtttctattctgtttgcgtacctgcagccgtttgattctctctcttcacccaaaatacaaaaagaagaagaacaaagctcttaaatcatccaccacgtcgtccggtcccaaagtggctgatccgacagcgcccatgcctgtgactaaggaccaggaaatcaaacgacgactactgcctggtctgtccctcccagacgaagtctggaaacctaccactgagtttgaaaaacgaccaggagaggctgatgtggcaggaaaggaagttgaggacctgatgagccaattggagaatgtcggaagcaagaaaggaagaatggcggccactgactttatggaaggctctgccgatggcgagagaaacggtccgagtgcgaagcggccacgatacgacgagggcgacagagacgacagagacgacagagacaaaagggaggatgatcgagggaggtcaaggtatccgagggataatggatacggaaacgccgatcgatcaggctaccagggtagaccggttatggacgagaagccggtgttgtacaaaatctacgatggaaaagtttctgggtggaaagactttggagctttcgtcagtctcgaaggcttaagaggtagattcgagggttagtctttctacttatgctgttgatagacatataccagtgtatacgattgaagtgatcactgactccgttcttttactctggcccctcatttgagttcggcaggcatggttcatatcgggtccatcgcaattggagggcgagtcaacaacccaggggatctcctcactagaaaccagccgtgtaaagtgaaagtcatgtccgttgctggaactcgaattggactgtcgatgaaagacgtcgaccaaaagaccggagcagacctttctcctcatctccgaatgaagaccgaggccgaactggccgcggaagaagaacgtcggcgagcccctcctcctccttcaaccaccggcagtaactctaccccactttaccaggtcgatgacgccaaaggaagttcagccaagcggttgacatcgcctgaaagatgggaaatcaaacagttgattgcgagtggcgtggtcgatgcgagcgagtatcctaacttggacgaggattatacgatcagcatggatggaagtggaggtagagaagtcgatgaggaggtcgatatcgagacgagagatgaggaggctccgttcttggctggtcagaagaggcatgtgctggagatgagcccggttaaggtttgtttacgatttcttgtcttgtcatggcctttgctttccaggatgatgttgccaaagtcgtgttggctgattgatttccggtgatttgtacctccttgaactttcctcctaggttgtgaaagctcctgatggatcgctcaaccgagccgccttggcttctgaagtattcgctaaggaacgtcgagaacttcgacaacaggaagcgcaggaccgggcagattccgaggccagagacttcaacgctccttggttggatccgatggctcagcagggagacaagcagtttgcccaggatctcagaggaacattgatgggtcagagtagtatgaacgagccggagtggaagaaagagaacaagtcaatgtcgtttggtacgaactttttatctctcgagtctttggttggcaacgacgagtaactgccagattagattatccttgttggtgctttatcctgactttctcatcgttgcatttgtgtctgcataggtatcgtgaccaatttgtctatccaggagcagaggaagtctcttcctgtgtacaaattccgaaacgaacttgtcagtgctgttcgagagaatcccgtgctggtcgtcatcggagagactggatctggaaagacgacccagatgacccagttcttggcagaagaaggtttcgccgatcgaggcaagatcggatgtactcagcctcgtcgagtggctgccacctctgtggccaagcgagtcgccgaagaagttggttgtaggttaggagaggaagtcggttattcgatccgattcgaggactgtaccggtccagaaacgaaaatcaagtacatgactgctggtttgttgttgagagaagcattaatcgatccggatatgacccagtactcgtgcatcatcttggatgaagctcacgagagagatatcagtactgatattttgttcggtctgttgaagagtgcgtttgttctattcttgttgttcttcttccgcaacaacgactcactgtttccatctcatctttgtcttcttgcaggaaccttgaagcgtcgcccggaatttaagttgatcgtcacctctgccacgcttaatgccgaaaagttctctgagtacttcttcggttgtgctatcttcaccgttcccggaaacaccttcccggttgagatcctctacaccaaagaacctgaagcggactacctcgacgcctcgttaatcaccatcatgcagatccatttgtctgaacccccgggcgatattcttctcttcttgaccggtcaggaggaaattgattccgcttgtgaaattctgttcgagcgaatgaaagcattgggacctcaagttcctcagttgagtatctacccaatttacggagctcaaatttcaagtgttcagtctaaagtgttcgacccgacgccagagggtacgagaaaggtcgttatcgcgacgaacattgcggagacttcgattacaatcccgggaatttactatgtgattgatccaggattcacgaagcagaaccactacgatccgaaacttggtatggatcatctgcaggttatggtatgtctctctatcgtcatctctttgtgcgcttcgtaacgccctagcttatgacctgacgcggtacgaccactgtttcctgatttttctggtagcctatctcccaagctcaagctagacagcgatccggtcgagctggtcgaaccggacctggaaaggcttaccggctttataccgagatcgccttccgaaatgagatgctcccgaaccctgttcctgagatccaacgaaccaatttgtcacccacgatcttgaccctcaaggctatgggtatcaacgatttgatcgcctttgactttatggatcctcctcctccccagacccttatcaccgcgcttgaaaatctttacgccctcggagctttggacgacgaaggtcttctcaccagactcggacgaaagatggccgatttccctatcgatccagctatggcaaagatgctaattgcctcggtcgactttggatgctccgaggagatcctgacgattgtagcgatgctgtccgttcagaacgttttctaccgaccaaaggacaaacaggcccaggcggacgcaaagaaggcaaagttccatcaaccggagggagatcatctaacgttattgacggtttacaatggttggaaggcaagtaagttctcggcgccttggtgtttcgaaaacttcatccaagcacgaaacatgaagtcggcccaggatgttcgaaagcagctgttgggaatgatggatcgatacaagcacgatatcatctctgccggcaataactacaaccgagttcgaaaagccatctgttctggattcttccgaaacgccgccaagaaggacccgacggaaggctacaagaccctggcagaaggaactccggtctttatccatccgtccagtgctttgttcaaccgacctccagagtggtgtgtgtacaacgaaattgtcatgacgaccaaggagtatatgcattgcgtgttggctattgaacccaaatggctcagcgaagtggctccggccttcttcaaggttgccgatcagtctcgtatttccaagcgaaagaaagccgagaggatcgaaccattgttcaacaagtacgagaaacccaacgaatggcgaatcagtcatacccaaaaggtcactcgaagcagtcagacgttcggttagatattttctgttcctttggggtggaggatcgtggcgaagcgattggaggatcaagtgggggggtatcgatgcaagtcgtcgaagagacggcggcttcgtctccttcatgttgtctcacctctgcatcatcttgtctaattttctttatggttttgatcattatgggtgtatatgtttgtctctctttcagggttggccctcttatttcttctttccgaaaagtgtcctttctttctccgtaagtcttcaaaatcttagacaagatggggaaaacagatagtttataaaaatacgtgggtaattgtaagattaggaaaatcacagaagagaagaggtaaaaaaacgagttagaacagagaaaagcctagctctcagatatgaggattatccacagtaaaaacgaagcagaggaagagcagaaaagagaacgaagacaaaggaagaaagaagaggggaggagagaaaaggagaggagaagaaagacgaaatgagttttatcgtcgtccgttcgactttgcgcttcccttcttctttctcttcccttcgtcctccgaatcgtcactatcatctgctttagccgcgcgtctggttttatattggtttggttagttttgccttatgcaaaagacgagagggaaagcaatggctgatcagctcacctcttatcatcagatctagccgctttcttctcctgctcgtcccagctctctgcctctgagaattcagcttcggatcctgaatcatcagaagcatcttcatcgaagtcggatcccgaagagtcactttctgatgccgattcaagatccgactctgcttcaaattcggatgcagagtctgattcgtcagagttttcggcctgaaagggaatggtcagaaggcagaggattagtacaatggaatatatagtgacaagagaagaaggcaaagaaagaaaagcaacccacatcagaatcaccggccaagaaggaccatccaccatcaacgaagaacatgtagggatcctcgttgatggtcttcatgatctgattccaggtcaagttgactgctccctccgaaatgggaatatcgacagagctaatcccatgcaacaaaagcagatgaatgctatgaacctcttctataaaaagatctgaacacttactctagccattctttgataccctccaactgaccgaacggaatagagttcacatggaccgggggtttggtgaagtctgagaagacaaagaccatatcaaattgtttgagtccatgctggactctctcaaaatgaacgacctcaacctcgctcagcgtgatcaccaaatttggcatctccgttaaatgaactaggcagtccgtcgtaggtgccaaaagaacattcgacttgaaaggtacaccttggaaacctaactcccggaacggaatatctacttcgaaatctccgttaccggaagtagcaatcttctcagcgaacgatttgaactctttgttgagttgttgccgtcgtttcctttcttcctgttcgagctcaatctcatcttcgtctccgtatcggtactttcgctttcggttacccgtttcgtcgaattgaacatccgtagcttccctggtgaattggacgtcctatagaagatcacacagaccagatgtcagtggatgacaggtacagagagtaagaagaaaccattctaccttggctttcttctttccaatcatgatcggcgccttaagatgaacatggatgataacaaggagctcatcatcacaaggttggaagaacagatgcttgatattactgaacaataggtctgtcgttacgtttcatgaatcaagcccgcaacatgttcagctcgatttttatacgggcataccttttttctatctagtggaaagtgttcagtaagaaattctactcaccgactttctgatctcgatggttgatgtatcggataccgttgtcatggatttggagatctccggccaatcgcttcgtatccggtccaggacgaatcataacctccgtcagtacatgcggtcgtttacctgtacgtttcccacacacgcgcatatgatagttagttctaagagaccagacgaaaagagaaggaggaagacgaacctcgaagttcgatcaatcgttcttgcgtgatgacatctgccaactccttcttatccttctcccgtttagtcatcaatgtcctcatttttgtaatctggtcaaatacttgggagaaatgatgatggtcggttgatcggaagactgctgagcggatgaatgttgcattgggatcttcgaatggctgtatttatatcggcattaagtatcatcaagaaaacctcaacaaatgacagagagtagatcagaaagcgactaactgtgtcctccttctttcctgcgatctgtccaggcgattggaagttgatccggatatacgtatattcaccctcttcgtttttactagcgttcttgatagtatttatatggaatggggtagcgaatccgttgataggaaggataattgttgctctttgatcatccacaaagatctgttgttttcgtaaaaagggaagcgtcagctaatgcgtggagtcagaaaacacatcgagaggcagacttactcgcttcttaacaacctccctaggtaactgctcttccctcttataactctcgaactttttgaaccctttcttgacttctcccgatcctccttgatcctggttgaacctcttcagaccctgctcctgtcttaacgcgtgtaactctttttgatgctccttcatcttttgttgggacgtttcgtcgacctcggagcgggtatcattccttgtctttcctcggaggactttggaaccgacgacatggccggtcagcttcttgggagatgggggcgctcgcttaggagctgttttctccggttcctcctagagaattccatatcaaagtgcaaagacgtaagcgcttctctcaggatagcatgataagccagggcaggtctgatagggaaaagaagagactgactccgcccatgaagaaaacaacatcgttcaaactcttggatccctctgtgaggacaataccttgatcttttccgacttgaacagtatcaatgagcaagagcgcgtacctaaatcgtgaccatcaccttcagccaggtaagcgcgaaccgttgccaacactttgagtgaactcggaagaagaagaacggaagaacgtacgtctgtcctttctgcttggggtcaggtagtccctggaatgccacctgaaggttgatcaccattccttctctcatcgcctttccattcttcgtgttcaacaagaatgacgtgtctctaaattctaggccggtctgtgatttatgtttgcgtttttcccatatcatcatcaacgaaagttcatctttgctcaaaacgcgacaaaaggacgtaccctcgatcccagtgacttctggaagtgagattctaaatcaggtctcgaactcttgacaaattctatggcattggcgatcagttcgctgacgatagctccatccttgatgagagataagatgtgttgttggacttctagtaggaacgagtaattcttttcttgactctgccagcgtttgatcgaaatatacaagaacaatcagcatatagcccaacggaagagacaagaaagaagaagagaaaataaggcgaaccttgacagggtcgatcaagaatgtcctacccagattactgcaataacttctgaccctcaaaccgacgcttgctaagatcacgcctgccttcaagtttttctcgttcgattctgcggatggcttgagatcatattctccaccagactgaatgataggtgtgtagatccaaataactgatgagaagtcgacctgttggagcgcgagcgagtatacataaagagattagaacttgttggttcgtcaaattcatagaggaaacacgaactcaccgaagcaacagcaggccgctttgaccacaatttcatatccggtcctgcctcctccgttccaatcttactttccactaaattcgccaactgcaagatttccctccaaaaagccaaacaacgcgtcggatcggaatcaaaatgagccatcggttccgctgtcatttcagacccaagtacaaaggattgcataggagaacataccttctcgtgagagagtttcttgtcggcctcgattgtactagccatcttgtcgacgaaataagagtttataagtgtcgaagtgagaagcgctgctgtttgaatgtgtttctgttcgttgccagagccaagatttgtcaggtcatcgtgtagggagtgagggtgaacgaaatcagaagtgaacgaacaagctcgcttttgtctttcttggccatgacggtgctcagacctgaagaaacatcaacctcttcaaaagttgcggttgccaggctgtcctcccaaccatttcacgcattcgaaatccagttccaagcccataatcgtgtcagcgagagattgagaactccaagcgtccaaaggaggactcacgccttggtccattcgtccaccatctttccacgatgcttctctttggtaagcacaccgatcgctttgcctttacccgtcttttttaaagtgtccaccaagtctgtcaggacacctgttcaacaatgaaaatagttaaatgaggaagacaggaaaagaaagaatacgttgatgtgatgagattaagaaaaaatgcaattcgaagcgcgcgcaagaggagaggtggacgaagaaggatgcaaaactaaccgaacgaagcagggtcctttgcgttcttgggcacaatcctgatcgggatgtccgccttatcagctgccaattgctggagaattttggctgacagagattgatttagggacatgatacaatctcaagtaagctttctgttcgtaagagaacgggggtggacagagaaggacgatggagaagaatccacctaggaacgagataagacaaacctttggagggagagcatacaaagacgatctcatctggtctgaatacgatgatggttgagggaaactcgtatccaagcagccaggtctaagaacgaataagaaagtggcaaaaatccgagaggaaaacatcagcacattttgttttgttgtcttcctcttccctttctcctcgccatagatgaccgattcacgctagagcggaagcaaggacaggccaggaaggacagattctggttgactgacctgcagagcggtactcttcttgtacactccatcctcgtctggatcgccgacaagtatgacaagcgcgtccgcctgggcaagttgactatactcatcgacgtctccgggagtctaagatggagaaggcagtggccgaaagatgtacatattcacatcgagacgagataaagaataggagcacaaacaaaagatgaaaagcacacacataacgtcagccatttatcaacgggaaaggatagacagaccaagtagagacaggcgaagcaacagcagcaaaagaaagaagaaaagaactctgaaagacagaccttccaagcgtcgaggagggatttcgacctggcaaagaacgcggggacgtccaggttgatctctgacatggtttaattctctgtggttctcttctttgcggggatctgttggttctatagcgatgaagaacgagcgagagaatcaatagaaaacaaagatgatggtcagaggaagagaagaaaaaaaggaaaagttgttggctgagatcgcgtccgggtgggagatgagcgtctggtcgggggtcgcgtcacgcgttgtgtaaccacgggtcatgtgactggtgacgtaggatgtgaccatggtcgtgagtgctagaacaagggcgatagagagactctgaagagaagggaagagaaattgaagatgcagatgaagacgcagatgcgcaagaaatgttgcagagatacgcaacaaggaatacagactcaatgagagctgaagaggatggaggcctaagggcaaaacacaaacgacgctgactgcacgagcatatgatacattcagacctcacatgctcaacgcacctacacaacttgtaccgcatcagatcgagtgtttcaacccatgatatattcctttattcggacaatcggttcgatgattacaattccatatatactgtctcaagcttggacgcttcgccttcgcttataccttctttgctctcggcggatcttttcgtctctgcttgcccatctatgtatcccgaatttatggtagtttgtatccagaaactcatgcgcgttcgtgttctttcgagagcttgacaagatcctcgaatggaacttgacttccgccgaagatatcgagtgacctaggttgatatattcaaataagcatttcgaaaagaagagatggtgaagaaaagccgagaggaacgaagagaaaacgaaggaggtggaaaggaagaaaaggaaaggaaaggaggcggaacgtacgagccatatgtgagatctaccttcccgttggatagtcttgagaccagttccaagtcggatatacctgatcacacatacaagaatcaaaatggtttgtttccgagtttgggcataaagaagaaaaagtagtaagagaaaaaagtgaaagaaaggatcgagcgtaccacgagcaccgccagcatacgtagttgggatatgcacccactctcccagccctaccattccgtaaaccatttcgcgccgtaccggtagaggtgtttaggatgttcagaatgtcagaatcattcacagaaggcttggaaaagaaggagaagaggacagaagaacaaacttgaaacaaggtcttcatctattccctggcataatccctctacatccgctgcgtgaatcaagaattcacttttgttcaagagaaagaatgaaatacgatattgtcagtcaagctggatcttcttcttttcttgttaagctcgagaaagagaaggtacctgcagtactctgccagcatatcgagggattctgtgtcacagccaacagagaaatctttgatcaactccatcgaaacgactaggatacgcagaacagagtataggcttaccctttgtgacatccagatccgtcaaatcctgccatttgttcatggccacaacccatcgatctcctctttttcgacagcttacatcgactactagtctgtcctttcccaccgcgttctccagctctatcaatcgctccaaagagaatttggccgatgggaaaagatgtgaggtcacgataactttcgaagcgcctgctttgatccactcggatgcattcgtttgattgattcctcctcccacttgaaggtgatctgatcattgccccgacaaacagagggtgagtagctggggatcatctttcgcatgtagaatagaggaagaacgcaccaggccatgtagaaagtgcttctttggcggccaggtcattgttaggtcctaatttgatgacatgtccgccatgaaggtcatgttctttataaagcgaagcatagtatccaggaggattactgacagaccaattggtttgttcatcaatcagacatcatatagaaccggttcgtaggaatgagtctgtacttcgtattctaaagagaccgttcgaaagacaaaggatattcacctagaaacaaaattcgtcttgagctctgcttcctgagctttcacgtcggacagagtacctcctacgatctgcttgacgagccctccatgaagatcaatgcaaggacggaagagagatttcctggaagcgtcttttgaggaagcggtcatggtggatatcgaatccggaggatggaagtgacggtttggggatggtatatgatacaaagcaggtatggtgatgacgagttggatgaaggagtttaaccctaactgatgatttccactaacgactatcagcagctcccaagcgtgttcacttctggaagaccctaagtgaagaacctcttacatttgccacatcgactgttctttgatggctttcacaggcaagttagtggcgagtagcatcgtccgttttttttgttctcgtgtttacaaaaatcgaattgaagaaacggaaggaggatatctggcgaccgtggcactcattcgagctgatcgagttgaacatcctctcactttaactagaattcccacgtttatcccgatcgatatctaccgagaagtcatcggacaactcttcttagactcaatatcaccaaactggctcgaaagagaggagataaaagatgagcggaggatcaagctgtttgaggatctattgtcttgctgtttagtctcaaaggaatggctcgtaagcctctttctttctttctttcttttgtgtcttctcagtacagatctatcttatgcttaatgaactattaccctgccatttcaggcgatcacccgtccctttctctatcttgacattgacttgtcgtgcatcgataacctggatgctctgttcaacacactgtccctcaacccatatatccgaccatatgtcaagcatctctctttcccgatgacgtcgatcgagcttttggaaaccaaacgtcatctctttccctgcgcccaactaagtttcccatacgatttcgacacagatggatccttgattgatggcattcccgatagcctgctctcgttcacccgatgggaacggaagatccaactccggaaaatcgtcatcgcttcctggcaaggtcgttcatgggaaccagcagcaagagtcctgattcgtgctagcgagatattcgatttgactcaattggaggcattggaattttcagaactcccagtgggagatacagagctcgagctggcagagaacccaaagtcgtccgatctgttggaaccccttcggaggattcttttagattcattcggaccaaagatgcaagaactcaagataacgacgacatctaggctcttgttgttgctctttctcgactctctccctgatctccaacggttgtcgatatcggctgacctagccaacatgattctcaatcggacgtcctacccacgactcgagtctctccagatcatgactgacccagatatcgaacctagtccgatccaagaacacccggacctccttttctcccggaacgatacactcgaacgactcgcacgagcatttcccttattaagagtgataggggcatcaccttacatgagcgaacaagatatatatgccgacgcagagctgatcccggacgaggatctgtttgcagagctcgaagaggaggatttgatatctatggaacagcggagagatgagatgcgggaatgtgcggtggagctcaaagaggttggggttaccttggtcgaccagtggggagttgaatggctaaagaagccaaagtctggattgtcctccgactgggctaaagatattctggtcgctctcacagacaggcaggatggagagcgagaaagcgctatgtgagagctgtttatgatatatgtttctagcatctctctcttcttctttccctgccttcttgtaagatgtatcggctctgtttctgcgctatatccttgacatcaggtggcagctacctaagatacttgaaaaacagaaattcaaaaacagcgccagcttcttacaccttcctccgctgtcttttagtcctcctacactcctctccgcccctcgtctaccatccattagaagaaagaacaaaactattaaaatgtctgacgagcagtacgttcgcatggctaccatgctgctgtttggcgatttatcactttcgtcgttgtgcaaaagtgactgactttcattccgtctctccggggttttttttcctctgtctttttttcctcctccctcctttctattggattctctccgtccatctgatgatgatccgggtagagttgttgttgtaagttggatcatttggtgtctctttcctgctagggatggatgagcaaccacggacggccgatcttctcaagatcgacccatatcaataacatccagcggaataaactctgacagtgcttctttcaccccttccctttttttccctacttccctctgttcggacaatctcaccaatggaaatcgatcgaaaaaaacctcgaatgtagatgcaaaccgctgggtttgagtaagtgctctttcaatctcctacaattcggtcatgttttagtttctcacaagtcccctcttctgttgttggaatcgtttgtctctttcctttgggaaaaactgtgtagtgcccgattcccccaggtatgtttataacgtcgcgttcctccactctcaatatatcacccaacaactaaatcttcttgctaacgtcctatcctttccttgtgcctgttcgtcctttccacacagaccaaccagaccgtacggactttcaatctttccttccacttctcctttcttgctagctagatcaagcaagattggatcatgcgatggaagactccttgaagctgaatttatatttgtgcttcgtttccgtcatttccggggatatgggtcgttcgggatcatgcagaagcactggtacgtgatcagatttttcgagactctgaccccaatttttggactcaccaatagacttgtgtcactcttgtttcttatcgggcggtcgtctgccactctttctttcacttctgtgggaaaatctggtctgatctatgcttacagctggcagaactttgtggactaccacaagtgcatcaacgccaagggagaggattacgctccgtgcaagcagttcaagcgaacctaccgaagtctctgcccgaatggtccgttccgagtttgtttcgaaaaatgctgtcatggatgctaacaaggagacacggtattttgctcttcttcttctttgctgaatacagactggatcgagaagtgggacaaccagatcgaggagggcaaggttagtttctctcttctttccgatttggaatatcacagcgtcgcttggcctgactttttccatttctcatgtctgcactgtctccagttccctgccgatctttccccttagatgtagtgtgattgcatactcggtcaaccgaccgagaagaaggagacgggaagaaacataggatggaagcgaggagagatgacatgtcaaattatgcgattttcaattctgtttgtgtgtgtgtgtgtgtcgggtccttcatttgctgtattcacatcgaaagtctacgaccaggcaatttagaacgaacatcaacccaagagggagtagaatgcacaaggctgctgagaatgaaccatctgaaacttggatagatcgtacaggaggagaaaagagacgagacgattggacggtcatttgagttttttctccgcctgccggttttttcttttttttttctttctttnnnnnnnnnnttctcttctcaccttccttgtgcacaacacacttcaatcgacagatcactctactctgtcaggccgatccacatagcctcaggcaagaccacaagcaagcaagtctggtctcacgccaggaatagagacacgccgacaagaggataaaacacaaacgacgtcgtgtacaagggatgatttcaacacgttgtttcccttctctttcaagggcctcgatcccgtccttctctcgacacgctcatatctcgtctcgtactatcccgtcgataacaaccccgtcgggcttcaacctatcgatatcggcatcgacagcaaagttcagaccgggagttttcgtggggacaaagaatggctcggataagactgaaagggtgatgatgctatccggccagtcgactcgacgtatccggttgattcagaataggtcgtactcgactgtagctccgtcgtcatcaacatcgacggcaaagacgataccaacaacagcatcatctccaaagacgtctccatcgccgctctcaccagccgcccccttcccgccatcggcttcttctcctctagaaactctatcaagtccccagctttctcgtccaccgtttgctccgctgccacctttgaacccacgacgactgatgaatctctatcttgctttgtccaaatctcgactatcaatcttggtcaccttaacatccaccaccggactcgccttatcccctcatccttcctcgctttcggtcttgctttctttgacattaggaacgttcttgacgtcggcgtctgcaaactcgatcaatcaattgtttgaggcacctctcgatgctcaagccaccaggacgagaaaccgaccactcgtcactcgagcgatctcccctcctcacgcagctatctttgcggccgtctgtgcagccgtcggtgtgagcgtgttgctctggggatgtaatccaacgacggccattcttgggctggggaaccttgtgttgtattcgtttgtgtacacacctatgaagaggttgacgatctggaacacctgggtaggcgccatcgtaggcgccatcccacccgtcatgggttggactgctacgggcggtcaactttggccgacgaaggagttcaagtcgtgggccgggctgccagattggataccggagagtgaaccggtctgggtgagtgtcgtaccgagggacgaagaggaggaggaggaggaagagactccggctggttgggcaccggtcaagaagaaagcgttcaagctggacaacaagtgggacggtgtgagagcgccaacgttggaggtgagtcgctgtatcttctcgttcttctctgttgtatggagcacagagagagctcatgttagagaaaacgtgttttgcattggatggatctaggattaccaaccgccgtcttacaagagttctggctcggacaattcgggctcttctagtgatgccgccaacgatgatatccctctcccttcgatcgcgctcgaagcaccgttaccggtatctccttctcatcctggccaggtccagatcacagcgctcgctccattatcgctcttccttttgctgttttcctggcagttccctcacttcaacgcactctcccacttcattcgatcggcctacgcttcttcctcttacaagatgctctccgtattaaaccccggtcggaatgcagccgtgtcgctgagacacgctctggcaatcattcctatctgctcggtcctcgctccgttgagtggagcggtcactccgttgtttgccatcacttctcttgcgccgaacgtgatgtttgcgaaaagggcgtatgagttctggaaagtccccagagatctccaagccagacgattgttctgggtctctttgtggcatctcccggtagtgttgggtttaatgatcattcataagaatgatgccggttggatggaaggagtccggaagagtgaagttgggaagtgggtcgtcaggtctaagccttggaaggtcggtacagatgtctggggctgggtcagtggctccaaggagacgccggaacagttggtagacagggtctggggtccaaaggggtcagagcttcctatggcgattccaagtagaaggaagccaccgcctgttcttccttcgtaggctttctaggatgtgtgtatgtgtgccataatgtatatgagctctccttttgtagatcgtgtgtgtgtgtgtgtgtgtgtgagagaaagcaaagcattaatcaatcgatacgacatttccatacgttcttactggccgattgaaggttgactgtaagaaagcagtaccgcagatggggccgagaccctcttgcccattgtctctatcaagcatatttcctcgagacacaaagccacagcacttcagcggctcaaaatctccagctcggtacagtctctagacaaacaaatagagtagcaagggtttacctcaaagagctcacccggtctcttaggtcgaccgacggcgttaagcgttagggttagttcatatgtgacacgccttttcaaccggcgtcagatctcgatctcatcatcatcacgaccatcacctccgacgacaggccaaccacctctacgctcgtcctttacatgcgattcaaccctggaaacatactcaaatctacgttctttgcatcctccactttctcctcccaagcatcaaacatggctaagaaacccagaacgatcccagagccgacggtgcctaccgcgattcagtcgagagaaatccaaaagaccgacagtggtggttagtccttcttcgatcctttttcatttttcattttttatttctggtttgcgaatcgagatagtctgagggatggatggcatagtagaagagtgactgatcgtgtgtctcgtgttgtccttcatctgattcagtcgacgtatgtttccgttttacaatttgagaccggcgacaaaaaaaagaagtggaggcattgactaatcgtctcttgcgacctgattgacttcatcgtctgttctacatctctctcagcacgcttactttgcaggtggatgcttgtatgtagttctttattttttatttttctctcttctttctacccattttgccatagggaagttgacatcaaaaattgaactcaacccagctggggagtagagcatgagttcacttcttatttcggacacctccgtacgcgatatctctcatttccaaatctttatttctctctttttctaatggcgtgatgcaataccccgtgtggtcaaacatccaatgctaacttgacatttcacaaatcgtttgattgtgtagcctcattcaaagccgtttccgggtacaccggtggaaccagcgagaaccctagtttgtcctcttttcgcaaaataacacatttcgttatgatttgattcaactgactttgatctgaggtcatttcctctgaatcagcttaccgagaagtgtgctgttcgtctcgcttctttctgcttttcagagccccatttaagtgggtggttcaaaggaaatagaactgatcgattatgcaataacagccggtcgaacaggacatgccgaggccgtcaaggtcacttacgataaatcttctgtaggctatggagaactcgtcgaggtttgttatcccttgcgccttcttttcatcatatctccaattgatttgagctctgacggtttccgactttgcgtacacgtctgaatggggttcggtacagttcttcttcagaacacacgatcctacaacggctgatcgacaaggaggagacagaggatctcgttcgtctttgatttttctttccccatcttctttctctcagcattctaaatttgatcattgctgacattctcctttatctttcttctgtttcttgactacgggcgcgatgaagaataccgatcggccatctttaccaactctgacgaacaatcaaagatcgcgctagctgtcaaggacgaagttcagaagaaatagtacgttttttttttgtaatttctcccttcttttttctcttttcttctatttgttcatgcctgactctcctctcaacccggcaatgtctttctcgttacgaaaatctagctttgatcccaaaggttctagagttgtcacccagatggcgtctcttgggaaatggtacgacgcagaggactaccatcagttgtacttggacgtcaaccccgacggataccaatgtgctactcatcatcttcattggtgaataatgacagaactcccatgtttttttaaaaaaatcttgtgtatgaatatatatgattcccatcgatcaatcttcattcttacgtgtgacagaacaaatcgatgtgtagaagaagtactttccttctcttcatatcagatcccaggcgcatcacaaacgaaatccaagaaaatccttccgcttcgcccattctctctttcttcttattttcttcttccgaccttgccttttcttctacctctcaggctgctgatcatcaccaccgtccatctctccacccatcgtctggacacctcctccaccctcctcagctcctggtcgtcgggcggagactacgtcgtctactcttaggagcaacgtagcggactgtttgccaaccaaaggcatgcggggtgttcgtaatcgtatcttagtctacgcctcccgtaaagaagaaaaacaaccaccataaacaaaggggggaagaaagagaacttgacgaacctcaatagcagtcttgagagtttggatcttgacggctgcggattcataaaggccataggttttcatgtcggttgcttttccggaatcaccgtccactccccatgaggattctccgttggcgtgtcgtgcctattaaataacacgagcggacaagagacacaacgcgttagagagaagaagaagagagacaaagaaagaagagacatactcggagatcggttaggactctcatagcatttccaccacagttctggatcagcgttctcgggataacctccaaagcctccgcacaggccttcaccggttcaccctcaattccgtccatcaattttgctcgcctcatcaattcaacagagatggccatctcagtcgctcctcctcctggtgagaggagtgggttgaagacgacgtttcgagcaacagccatggcatcagcgaggtttcggtcaatctcgttcaaaatatccttcgaaggtcctcggagcaagatagtgcaagccttgggcgaggtgcattcggtcaagaacgtgaagtacctgtaaagtttccaacatggttgatgataagaacacatgtcgcagtgaacagcgctagatacacaaaaataagtggacgtactcgtcacccatcttctcaacattgaataatccacactgggttccgacatcaacctctcgaagatcctcaactcggttcacaatggtcgctccgaccgctcgagctatacggttgttgtccgactttcggactcgtcggatggcggtgatgttggccttgagaaggtagtgttgggcaagatctatttcgaggcacatggtatgtttaaatcagctctcggactactgcgcaaaaggaaggagagagggcaaactcaccagagactcctttctcggtaaacacaagatccggcttgaactcgacgatcttgtcacacatcatcttgatctgctcctcctcaatttccaaaaccttgctccagtcctcctccctagtgatctcgatatttgtttggctctcccccttcttgtactcaagcgggcagttcaggagtacaatcctcgggttctcgattcgcctcctcatctttgggtgcgtcacatccttgttgaccataacaccggacaataccttgcaatcctcaatctctcctccgggcaccttctccactcgggcgtatcgcttgatatcgatcgtcttgatctcgccagtgccagagttatcggctgtttgagagactgtgcggacagcgtcgagcgcaagctggcacatcagatccgaccacctggaggagaactttgtgccgagggaagtcttgatgagcgcaagcatctccttgtctgaatgaacatcgaccggcttcgagatggactggataacatcgagagaaatttgaagagcagccttgaacgcagagataatgacgactgggtgaatcgatcgttcgagcagagggagcgagtgggccaagatttctccagctaagatataacgagaaccatttacgaagaaataagcttctgtccgagacagtcaagacccaaacgaatcgatgggcttaccaaggatgataacactagtggttccgtctccaacctcttcgtcctgagttcgactaagctcaatcattgacttggcggccggatgagagacttcgatctctctcaagatggcatttccgtcgttggtaattctgttgagtaaggaggaaacgtgagtactcgtctgaaatcttggagtaaaaaaaagaaacataagatcgaccagggaggaaacagaaggaatgagaggcaacatacaagattcctcccataggatctagaatcatcttgagcatggccttgggacccaagcatgttcgaattacatctgctaccgtctataggaaggtgtaagcatatatgggttgccagtgttgacagggtttagttgaacgacaaaataagagcaggcaatcagaaagcacagaaaagacctagtcagcaaggagttcgttcgaaatgtgcaccttgtgaaaggcagttaacaaggacgtcatcgagttgatagatttcagacaagacagtatgtccaacaagtctctgtcataacagcaaaacgaaccttggcagcattgatgtttgcgatctgagccttcctacccgattgtcgctcgggtccagtgtctgattgtgagacgagtaagcaacatgctgggtcagctatgacaacacgattcactgtgtaccacacctaatcatcgaccacatagagttcaaacgcgaacatactcatcacaaatacgttttgactcatgttgggcgtgatggtagagagtgttaaatgagaagggaaggatggaagacagggcttagggtagagatgaaggagaggagaaaggaaaaaaagggagtgagagggtcgaggtgaattacgtaaggattgatgtaacgattcgtaaccaagtcgcgtcgcgtcgcgcttgttttgttacacgacacgacacttatatagatcggcgcacgaatcaaataccgcgtcatggttagtcaccaagttgacaattgatatcttcgccgtaggcgaacaccgccaacttttttctttttttgtgtttttgaagatcttttctcactttcgacacatccttcgtctactgtattctttgcaatcaccttctttcagttctgttttctttgacttttgatttttctgtgtctgctggctcgcctcttctcggaggattttttctttaattttctctccagattttgatcctttaatcaccatctcgtaaactcctccgctccctcagatcgctcaacactcttgcttgaacgcacagacagccacagtcgatttagcacacagctatgggcactgcttgttggttagagtgagtattcagagatctggtatatgttggccatcaaggaaaagtcaggatccttaaactgataactgctcggctttcccgttgttccatctgatcgctaaactttagcggtgacaatccttgtaagtcggtcgttctcaacttcatctcgcttcatgtccctttgcgccgtcttctacttctctctctcgctctaattatcatgaagctcactccgtatttctatgcatatccatctatgggaattgcgcctcacaacacatatctttgaagggtcatcgagcttagacaatcgtggtcagccgtgtaagatctacggcaccgtggactacatcgttgcttccgttctcggaggtatccgtcagtagtacttcacaatttctgagccattcatgtctcggacctgtatacatttgagctgaattgtgtctgtttgcttcctccttctcctcttcacgcctatctgtgtcaaatcaacgtagtggtcgtcattttgattgctcttggactgggctggctcattcaacattccaagaaagcttcgcgattccgcgcgttctggaaccagagcggtgatgaggatcttgaaatgaagacacaccatcaccgtctcatcaacacatccgaagttgaacgacatctctacgatcctccgatgagctctgccggttctgtccgaagcggaaaatccaagcggtctagcatggtacccatgggtgtcagcacagcttcctctaggaaaagcaagactggcaacaccggaactgccaacgcgaggagtcctctgagcggttggagagaaggagacgacatcacaagtatgtgctcaatctttcttttgctcttttcgttcttttctagcggtctttgatgaaagatcgccgaatctttgaaaccgcaggcgtaccaaacctctattctttgggcggtctaaatacatcgacttcctctctttccaatcgatctccatctccttcatcttaccctgaacaagtgaaaaccttgttatctcctgccccgtcaagctttttatcccctccgtcacagtattctccctatgcgccctcaacagaatatgaaccctctgtagctgcgtatcctataggatcaccttacgagcagagggaaaatcagccggggagcgtattccggtacgggatgactgaagggtcgaatccagctgtgattcctggagatatcggcacacgtccgtactcgccaggtctctatcagtctcaattcgacgatcactacagggatgaccggggatatactaaccaccagtaccgtagatgagagaactatgacattctatgtattctctatgattttgttcgcgtccttcttatctgcatatacctattcgtctcataaaaattctatctatcttaacgctctctcctaaaccatcgtttccttgtttttcttcctttcttttttccctctggacactacctacgcctctgacatcaaggaaccctttgtctaccctcttcttccatctgttctgatctttctcccttcgatattcgttatctctaattttcatccttcatgtcaagttccttctttttcgtacgaaatccaatggttttctttctttgtctggagcttaagcaaatgacaaaacatgaagaagatcgcgccgctcgacgcgttgaaacaacacgcgttttgatcctccgcgcctaaaatgaaaacacacgcaacccagttttcgtgttcttgtgttctttggcaacccacctcccttgcctgtatcctccttttatccttgattatttgagatcaacagacccggttgacgtccaagaaaacaactatggatcctaaattattatccgagtggacggctttcgctctcaaaggttcgtcacgactcggtccatctctttgttcatctgttgggattcctgacaaaatctctgtttttattcctatgtctcaaacgcgatttgtttccaaaggtggtctatgtcaaggctttgccaaggaggacttcgttgcacagggcgaaaattcattgatgtttctcaagggagacattgttgtcgctctcgaggcttgtgagaaagagggtgtctactgggtaagttctttctgttcctttcctagatcactgtatcgacttatcaggggaacttatcatgagatttgttgaatttgttctgttcaactctaactctttgccttccttcaatatagggatactgtgaaggcgttctgggccaattcaaaaccacccttgtcgatttccctcaaggagctatccctctacctcctctaccaacccgtcaacggcctagaccgagcgaactccctgatttcgtcttctcgcccgatccttctcctgcaattgacactgcttcgtctcctgtgacggccgtgcctttacttggatcaccaggagtcgaagaatcattatcttctttcgagtttgactctgtcagctgctcaagatcaacctcttctcattcatttgctcggactgaagctagcttaggggctagaacgggcaatcaatccccacagttaccactcacgcctccgagccaaggcaaccatttattcatctctcatcaaatcctgcaacaacaaaagttgaaagctccttctctgggggtagagttcatggtgacttctccaacagctacaaatttctcgatggaggatgatctcgagcgaagtagtagacggagctccgggcagagttgggcgtctgttaccaccgcaagcgagcgatcatcacaagatcaagatggagaagagcaagagcaagaatggaacaaaggcgagagattattgcaggaatgtattgaaaaggaggttgacaggttgtcgatccaacagatgagtagtttaggaagtctgggaagtatggcaagtctcggtagcctgggcagtctgacggatagcttgatcaaagagatggcagcctcagcagcgctccctcctgggtacaacccgaaggccaaacactggaaccttgaacaagatgacgacaagctggaggttttaggagaacctctggactcctccattcgatcaacggcaacagtcatgccggagtctcagtccgatagaaacccagtttctgttctccaatcccgcaaacgatctgttggactgtcgacttcctcttcctcttcctctttctcctcctcaacctcaaaccagactgtcaaccgaagcatcatcaacttcagtaattctgaccattcactccatcccgcaattaactctcttaacagaaacagactcggctcaatagcctcgtctgttagtgcctcatccgatgtcagattcgaatctgagctcagcgatctgttcgacgcatacggaagggagtcaatgtacgcctgccctgacgaaaatgtcatggaggctcagattcgggtccaaagttgcaaacagacgttcgaagatcacgaggacaccgagcgcagagacggggatgaagagataaccattgagggaagagatgagaaaagcatacagtcttccgaatcggcgagtagcttggtcaaagcgctctctgaattaacttctttagcttctccgctggacgattcaagcatgctttctgtcctgaaaggattagaccaaggtgcgccgctctcagagtttccaacacatatcaaaaaaagattatcgagcgagaacttggcgtcatccttaagaaatcggatcatggagcggaacagaacagccgatctcgggggccaaaaaaatgatgttgaggccggatctacgcccggcttagagattcaattagacaaagaagatgtcagggatatgggaaggtcgaccaagcgaccacctcctttgaaactcgatgtgtcgaacgtctacaatgccgacaccgctcagatatcgtctcctgcaactcctactctccatagagcaagaaccccaacattagaggcctcaacatcggcttcgacttcaccctcagttagttcgcctaccgactcccaatcaaaaagcattttacgaggtcaaacgaatgtcaatctgtattcctcccctggcccagttccaatttcattcttcctcaacaatagtcaaacccacttcacatcacctgcggagagcccgataatgtcacccaaatcgttcgcttcacccaagattaatccttcttccgaaggttttgctggtgtaggcgcaggtcggccggcagtcgtaggggacacaaggactcgagtcatgcctcggagggaaaggcctagatcgaagagtttttcgtctcaacaaggagttgagatcgggttccctatgctcagcacgttcgtatctcttctttcgcctttacactgatcaactctaatgaagcctattttttctttcatgttatatcttgtatatctctcatccagatccgagcaaggtgcgcctcaatgttcgtttgtcactctcaatccctcacctgttcctaggattcaaccaggcgacgatcaatgcgctccttatcacgtttctcgtccaacacttcagtctttgggatctattgaccctgaacctgtccgctcgcctactgtccaaccgcaaggcattcaaagaaagacaagcgaacattcccttcttgctgctatcagacgggcggagaacttaccggtaccttcgatccctagcacattcaggaaaccaacaactccatcatcccctcatagttcttcaccattcttgtcacgacctgagacgcctagatctgtttccgacacccgggctggtacaatgaccagcccttcaatcaatccaatcagtcctacttcacccaagatcccgaaatccagagggtttatgggatttggctttcttcgctcgaagtcgcaatctaacttatcgatatcttcgccaggcgctaggatcgatcctttcatactccctcctcagccttcaccttccttttcttcaggctctcctcctgttctcaagtcgattctaattaagactcctgtgaaatcagagattgatcccctttcaagtccagtccgttccaccgatctcggaacggattcatctctggttcatactcctgcaccttcgtttggttattcgagcagcccatcgagacctcggcttgcaacaacaatgtcctctgggacattaccctccttcgtgtcgagttctaatgctctagatgacgatggggaggacttattggatttccaacccagaagaatgaagcccaggacctcatctagcagttcgaccagttcgttcagggatctcgtcaagtcaaaaattcacccatcaccgaagacagattcgaagatgaatcctatgcattctccggtatctcacaccgacttcaaagaaagcacagtgaaagaaggcaaattcgaggtacgtctttcttctttcctcctttcacgaagagttgtgtacgagaagactaaatcatctaaatctggtgctgtgtgccacaatagtttgaattgatgaatccacttgcccaaaagctagccagcaaatccagtgtaaatcttacgccaaatgcaccttctagtacgcttatacctcaaacggatgaatggggtttcttcatcccctccagtatggtccagacttttgcatgtcaacgacgtactgcctctctggggcctgaagctgtacaagcctccgagcaaaagtggctttctatcatggacacgacaccttcgaacgtcgctgcgctacagaagaacaaaaagataaagaagttgctcagatcggatttgccgtcgtcattgaggaccaaaatctgggcgtttttgtgcgatgcgggggcgaagcgagagagcggtctgttcgcaaagctagttgaaaagggtgaggcttcggacgccatggtcaaagactgctcgacgtgagtttatatctcttctgtttatcgcatttgtgattcaattgatccaagatactgatacatcttgtccattatcatttccgactgttcagagtgtacaccgatcattcattattcaaccctccaaactctggtcagaaagacttgctcaatatcctcaaagcatatggccagtacaactctagattggactacaaatctggttggtcgaccttttcgttttatactacatgtttgccgtgtcgattttttttaatcaattaaagcttacgttcttactgagttatcaggtatgcccgaaatcgctgggtgttttgcgattctttgtccggcagaagatgcgttctggttattcgcgactacaatcgatcgtatcaagggttatcacaacaaatccttgccgatagatgcgatgtgttttgtccacttattggaggcggtcgataaaccattggctaagagattgattgtaagtgtcttttgccttgaatggactagtccctagtgcttttgcgttcgcgttgcttactatatattccatcggtgttgatctttgtgattacatagatagactgccagataaacccggaagcgttactacgagcttggattctgcccatgtttgttcgcgtccttccctggcggacagttcttcgagttttagatatattcttccttgaaggtcagatcgattgctttctgttctgatgtctcggaatctgtatttatatctacctagtcttgttgacaccctttgcacaataccttctcatacagatctcacgttccttctcaggatctctctcgccatcctcatcactgcgcgcgatcgacttcttgactccgccaccttacgtacccctgcgcacgtgaagtactacttatacaacctcccctctgacgagctggtctctcctgagaagctcatctcggtggctgatggtattaaacaaggtatgaaggatgatgagatgatgaaactaaggacaaaggctgtggatgaattagcgcaggggaggagaacggccgccaaagcaaaagctcaggcggaagcgaaggcattgaggaagagagtgtaagctggtgtggttcatttcttccgtctcacaattagattcacaattttatattttgttattctatatttttctcttcgggttgtttgcgttcatttttcttttgggtttcgtgatgtttttcttcatcggtctgagcacctttgtatacttctaatt

SEQ ID NO: 3202 - DNA, 8253 bp, Xanthophyllomyces dendrorhous
ttcatggtgttcacatgattcgtttaattttcaaattctcaatcatttctacatgttgtcgttggaaaaaaatgacttcttgttccagatataccctagtcatcatcatcatcatcatcagataaacaacgatgatacatgcgtgtctgttggtcacatccaggtggcttggcaagaacatgatgatacatacaacaaacgtacaacaaacacagttttgttttttccaagcagacaagaagaggcatacaagaacagaaactaaagatgtaattgcacaggagaacacagaacaaagtcgggaaaagtagaccgcaagagaagctgaatatcagaaaaaggttacaatcattctggcatcctcagcgtcaatcctggttttgttttgttatgaaaatgctgaatcgtcagtatatttacagccgacaagaacaaagagaactgtcgaacgattactaaccgactcgtcgaggtctgtcgcgcttcaagtttgcgccatcttcagccagcatgaagtatccatagcccgccagactgtcctccgggtcttccatctcatcttctggttccatgatcttgggagtcatggttcctggtgtggcgatccctgataacataacttctctgatgcgttctctgtcgcgctcggtaggcctgtcgatctgctcggaattggtcgatcggttggcttcgaggtagagttgtttgatcatgcgttgtgtttcaaggaagacagcttggagcgtgtctaaaaatctgtgtgtatgaatattagaagataatagagtcagcattaagggaatgttctcaattgatcgacaaataggagggaggcggaccgtttggtttgcagatgtttacttgctgcaacaacggcgatcccattttccttcacgatataacccaatccgaatccatcggcagcaacaggaccaaaactatcatacgaaaagccagtgacagacaaacataaatgaactaggcggagaaagaagagacggccgactggaagaatgtacatacccgaaaagtctcaacgccgggtttccgcaattcgaagtactcaaaattgaagtgttgagtaaactccacccaggatctgtgaatagggaaggaatctcgattctgggtgattttccgttcacaggcgagaatggttcatctgaatctgaagctgatgatccagaattggaagaattctccgatcgaacttctcgttgaagaaggctgtagagggcatagagatgtcggtcttgacctaatcctttactgcactgtttgacgataagatgcctatatgtttagactttaatcccgaaatcgcgacagtaacgaatatgagacaaacctctttcgtgagctcagtatgttttttgcatgcctctcgtaatttagaaatcttgtcctgtgtgctcgctcccgagcagaacgcctgcacgatcaacaatagaacaacaacatatactcaacgtgagtcgacacccacacaattaggtttgagaaggagatagagaatacacgtactttggtaaacgctacactagcaggttgaaccgttcgaatggcttctgtccgaccatgaaggaacgctttcgtcatcgcaggttcatacgtcgattcaaaccgacctgcaaaatgatttttggggatcgaaaacgacatctttatcaatcgtcaagtttttggcagattcctatttgtacagaagagaagagttggaacggaccatataatgaatagtaagccgcttggaacgccatctggacaaaggcgtcggggctaaatccatgtcgagtgactatataagtgccatcaatcagtcggttgatactcttccttcttaatagtgtcgactcaactcactgaaatcttttccatatccactaaactccaacgcctcgatatcgttttgacagatcaaatcgctcaatcttgtctctgcgaatcgtatacccgttcgaatctctcttgtcagatgccaagttaacttcttgggaacaacctcatagtcttcctcttcttcttcctgacaaccgttggtggccgtgccggatacaggagacgggggcggtttgaatttagtttgtttgtttttaaatgatttcgaatgtggagaaagagatgatttgaagagtgtcggagctgaagggttgatactcttttttcaaacacgtgaacgagaattagtacttggagtcaaatgttaccacacatctgacataaacgaactttggcgaatagaagaacgagctcggtgtatacatcagccgcatatcgaaggacagtgtctatgttgagaaagatggtgtaaacaatcaatcatcatcacgatatcgcaagaaaactacatgtactcacgaccgtcgactccggtatgttcaaagttgattcctgcttctccgtttgcacatacgataatttgaagctatgtgaatcacaagcagtcttcttcatcagttccctgtagattattaggagtcaaagtggtttctcgtataaaagcacgtactttatcatacctagattgatatacgcgtaaagccagaatgaatcagccttttatgctttggccgattatcaattcattcgggatgaaccctaccatctgtttgtgcaagttcctgtttgaattccaccttctaatctgtagcttccacataagaagtttccacagatctccttcgcgcctacaggactaacgtcatctaggcagacgatgaacaaagcgccatcaacaacactcaaacatttggcattgtgtttttccctggttagaaccgttctgagatgcgaccaaacctttcggttttcggtcgaaaggactccaaccgaggaagtagccacctataagagtcacataaattaatgaaaattctcaatggataacaataaaatagaacagagaaaacacatacgtctcggattggcaaaatatcagcatctttacagattgcctcgagattgagcatgacatccctctctgtgaagagcggtctgttttctctatcaagcacgtcgaaccagtctgaaattaccggacatggaaagcaggcgcgggtgaatacggcgtgtttcggagttatatcatgaagggagtgaccctagacgtacagaactgccctcgtctgatcacgacaatatgtcttgattcctcattggtgaccatcttacatcccctatttgtcggaatacgactcgttccaaagagctagtcacccaagcagtgtggtatcagccagattgcgcctcgaactgtgtctgaataccatttgaagggagttcgccatactctggtgtattgactcatatcgagactagttcctcttaccgcatccggctgaagcgtcccagctcgaagatcgtggataaatccaagggaagagatgatcaacgaagatgctcgagccaattgagagcctctcgaaggtgttgggtcatcttccagtacaaagaacgggttgagggacaaaacaacctataagaatcatcgtacagcacaacattcagttttgtctttgcctgagcgtcagtcaaccacgtacactacaagaggaaatgttggacgaacggattcagactgattgagatatgactcataccagaattcttcgatataagaggagacgccttcattgtactgcataagtttctcctgtagcctggggccttgggtcggattagacaagaactcggctacgacctgttttgtttgttcgtgttctcgtgcatcctgtatgaagatcagagtaagaataagatcatccgttccatataatttccatcgttccgcttctcggtcaaatactgatgctatgaaagaaggtctcgagagacagacgacatcgatcacccacctgaagaccctacttgacgaaagtcggacgaaattccagcaagacccaaaattacagataaaacgaattaataatcgatccatcttcaaaatatgctcatctcagtagagagtcatagagaccagaaaagaaggttgaagaactcacgagcagagcattcagatacctcttcatcgaatcctccaaggaaggaaccggaagacgagaaagagtcttctgcgctttgaaagtaatcgagctctcgtcgtagaacgatggtgggggtgggacgaggtttgtcatttcggtgctcgtttgtatgtacagttcgtgtgctttcaaaaaagaagaagggatctaaagccaacgaaatggtcgcatggctttataggcaactcttgatctctcggggaaagaaggaggcgaacgagtagttggcagggacggtgaatgatgacgcgcaaggcaattgtgagaggtcacgtgtcaaaccggagaatcccggtccggtccgctcatatcggtcagtattcgtcgggcaaatcaggaagaagccagttcgtatctttatctacctcgggaatccattaaatcaagaagtacgattgatcaagaaacaacaaagtagtctacacccatgttcataaacaaaagcaaacaaatccaagactgaacagtccggatgatgctggaacagcgaagagaaaccaaattatcggctgtcttccgccttgggcctcggcacaactacagccccatcctcatcaacctcatcctcctcggtgattgccccggactctctcgcctcgccactgatagcaccataggtcgtttcgaggttgctatcgttcgtatccgaatcaaccgatgctacttgagagtagagcagaggtcgttgctcggtggactccctgttggccgtcgaggctgaagtgatcgagctctcgtctagtgaggctggaggcgataattcgaccagcgcggttagcatcgtctctctggtcttgtctgacaaatctcctacagaatcagccgtgaatccagtcgtcgagataggtggcaagactgcgagaaaagggaaaaaaaaggaacaagggggataggaaattaaattcagccaatcagtcagtgacatgtatagagaagcatagatccaagcagaaaagactaactctgcaatctcaatacgcctccgttcattcgggtctttccatcgaagatgtggtgatagttctggcagacaattggaatcacaggcacttgagcttgaacagctagatggaaagccccttttttgaatgggagcagcgaggcattcggtgtggatgatcgagttccctctgggaagatgaacacagaaatctgattttgggataaattaatttcagcaacagaatcttcgaggcatacatcagaaatatctcacctgtttctttttaatctcttcggccgctcgactcatcgcctgtatagcgtttttactcttctttcgatcgatccaaacagtgcctgataaactcactatgaccaaacacaagagaaggtacatatcgtctgattagtatcaagaattcgaatcatgttggcaagagaaagagtaatcgagcgcgtactccaccatcccaggaaaggcacgtaagaaagctcctttttggccataatagatgccttcttcgggaacattgctccaaggtacagaatatccataaagcttttatcggagagaagaaatttctcagacgaagaagatggattgaggaaatggataacgagacagggacgaacctctggtggtttccaacaagtacggctggaccaccgttgttctctaaatgttctcttccttcaatctcaatcttgattccaagaataggagacgtcaacttataaaacgttctcgccacccaatagtttgtatttaatctctgtgattattgtatttaagggtggcggaaggataacatgtatcacaaaacaacgcgttagttgtcagaaccacagcaaagctaatcaaaaccccgaaccaggtaatttggagactgacctggccaaacaaggtgagcgtaagactgattccaatggccacagcgctggttgttaagagacacaacgtgtagatcgacaggttgatgtaatatctggctttttgtctaagaagaggtgaatcatgaaaaccgaggagcaaggagaaaatggctgccaggtcagtacagccggtcggaacctcggaacggagaatatcctgctctcgccaactagctcagttttcttccctctactcccttcctttgcatctagatatcatcccactcgtttgagcttatcggcaagacttatggaagctagacctcaatcctccgaaacggagaagatggaaacgtgacaataacaaaaacgaaagaaacaacgcttacgatttcattctgaaaacgaaaaggattgggacggaaagaagactgagtgtagtgaacggtttgagaagggttccgaccaaggtcatgcttctgtttaaatctcttctttcttgcagcagactatagaaagggtgaataagctttgtttgtgctgataagtaagatagaggagagagcaaggtctattgcgaggttgaaagcgttgaaaggttagtgcagaagaccgacgagagcgagtgtctcactcgatggggcttcctccttgtgatgcacgtgatgtgtgaagaatgtggcgaaggctgtgtaaaatctttcacgtgcattatacgccccacgtggccgtggattacgtagagcctacacggcgtttgaacttattgctggcccggatggagaacgaatcatagtacggaagcgcacaagacttagacatcaacaacaacttatccatcccttcgcaggcaaaccttcaagatgagtacggtcgagggagacgtagatccggctgcttcgaatatgttctacccagacttctcggtaagagagaagacttgatggctttggatcaattatgaaaatagccaagacttatacaacttctcatactgccgttcttttcttcgtcagaacttaactctcttgccatacctagcttgtcatcctcatccttcttttgtccttcccagtccaagagtacgtcattgaaggttgagacaattaagttatatatgttgatcttgtcgaccatctctttcgtatcccggcactctcgctctcccttttcatgttggctttcctcctcgtctgagccaagcctggtatcactttggactaatccggccgcgtcggctgctagtttagggaaagatttggaaaccattctttcgcctctagatcaagctcgaatgaagtctttgattctcgcgcacgaccaagacctcgacggcgttatctctgctgataaagatcatacaaccaaccaggctatggccgatgccatatccattccctctgttcgagcaccctcttcgattgaatcttacaattccttccaagatggtaacaattccatggacgggaatgaaatggatatcaccgtacggcttcctttatggggacggaaacgatcatacaaagtccttctagtctcgagcagtcatcctagctttctcattcttcatcttcatccgatatctcgcccgaatagtcacaaacccaaacccaaggccaatgaaaaccactcatcctctgtcaacccggtcgcctgggaggatcttcaacaactcactggggatgagataacatctaggatagaagtcggccagggatattcgagcgacgggaatgatgcgcatacacctatggcggaagaacatcacaaattactgacggagtcaagtatcttgatggatagttggctagcgcaggatgcacaagtgccggctcccccaactttagtaatcaacgagaaatcgaagaagaaactggaggagttcgattgggcgaaccatcccttaggaccggtgggtgattgttcatgattcagtgactgaccgatttctcaagttcacactctttctcattgattttaaatccttccaagagagacaaatggccggtgcctctagtcacgactgtaaacatgcttctttccatcacagattcctcctacatttgtaggtttcatttccatacagtcgaccttattcattcaagagatcaaatcttaccttctgatcctctctccttgataatcttcgggccgtttagggtggtcatatggcgatgattggattataatcagtgcgcgattgatcctttttctttgtcgcgttcgtggtcaacatcaacttctaatcatatctagccttgttttcctcgcagataacgacgcttatggccaagacttaaatgagaatcattttggaagttttgcctgtaagtttactcactgaatagcctgaccgatcatttgggtttgccaatggtgaattaactgaacaatc

SEQ ID NO: 3203 - DNA, 21001 bp, Xanthophyllomyces dendrorhous
cattcgtgggttgagcagaactggatggttgtcaaacaaaaagctttacactgtcaaaaaacaagaacaggcgtctctaaatcggacggttagtcatctgttccgcctgcatttgaatcatgattccataagtttaccgttcatttttacctctgtacatcgcacagatacctttttcttgaacggcatggagtgaggatctttgtcttattttctccatcaagatggacgatgggaaggggcgtaactcaatcttttctaaaaacaaaatgaaccaacttgttctcaatagaaaacacttgacctggaaatggaccccaatcgtctcgggagatggggaatgccgtaagttctattttacaaccttttatatttttttcactcaaacccctatatgaaaatgataagttttctcattcgtttgttcaacaaactttcagatggtatcatggttactactcatgacagcacaggcaaagtcttgaacgaacgatggcagcaaacatccagagaaatcgttcgccgattgacacccgcgcgtactatttccgaattctgcggaagtctcatgaaatctctcgagattaatgaacgagattttccttacgccttcctgtatcaactccgatctgaaaccgcctcgggggagaagacagatatatcagtcgaagcgaacctaactttagcaggaagcgttgggatacccttagaccatccggtattaccaagatcgacattcataaagacttcgttagataaaaattcagaaaacagagatttgacaccgtggaaatttaaggaagcaatcgaggcggctttccactcggatgaaccaatctcattaccggacgttcatgtcaacatacctgaggaaatcagatatcgtaagcatgaacctgatccagtctttctctgatgttcatactattaaaatttcattcatgatacaggttcttatggagacgagaccaaacaggcggtcatcatgaaaatagcaaacaacgaagaacgaagagggaagatctttttgtttgtcccgtttcgatcattcatcatattcgctacatttaatggatctttatcaaactcatgtttgtatcggaaacttttctagcctcgtcatcggtctcaacacccgtcgaccattagattccgcgtacaaggcccggatagatgatcttagacttcaacttatctcaaacttgacgatcatcacttccttcgagtctcatatggacagagaacttcagctgcaaagtatagagaaagcaaaaagtctcttcttcagctcagtgtaagtacaccggcctagccagatattgatcttgacaaatatgagaagtctttctcaactgacttggcttggacatcagatctcacgagcttcgtactcctctacaagtttgtcataaatttggctcttctttactatagagtagaagtcttctttgttgactagacttgtttctttttactcaaaccattagcttatttccggtccaatttctgatttggaagcaggagagagcgatccgaagaagaaggctagtttctctatgattcaacgaaattcgacgcgattagccagacttgtcgactccttgatggattttaggtatatttacctccaaatatcgccgagtggtatacgtatgtattgagagactgattctgatctgacttgtgaaactcttaatccctattctctaaagtcgtatcgaaggtgggcgcatgtcaggtcggtttatcccgattaacttctctttgacaactatagaattgtaagtatcccaattctgttcaatcccttcacagatgcaagactgactctcgtccattgagcagatccgaaatgttcagatcggcgatagaacgagtatgttgatcaatcaatttgcagtttgagaagattgcgtcagtcattcataaagtcactggcccgttgcttctgcctgtgtattcaaatcatcaatcaggctcgtatcacatatgttgttgattgtgaagttgaatctggtgcacgacctgtctatgttgacaaggtaagaaactgttttgatctatgcctggcttgtattcgaacctgttcattgtgtgtgtattgctcgatcaactaatttacattctgtcgatataatcatttaggagttgtacgaaaagatcgtcttcaatattttgggcaatgcgttcaaatacacactccgcggttcaatcactgttcgcgtgtatgtctctgtcttacgcatatacattctttgtttccgcaagagctttggctgattgaaataacattcgatattctttgcatgcatcatgcagctctcaccatccttcggaggtcgagctctgcgtcaccgacacaggggtaggaataccaaagcaggatcttccacgagtcactgaacggttctttagagttacgtgtacagcacgatcacacgagggaactggtaagcatctccttagcctcgctaagtctcggaagattgtctttaggtgctcatcatttgagcgatctgacaggcatgggccttgctctttgctctgatctggtccatctacattctgggagattgcagattgactcagaaactgaagaggaaagcccaacaggtgaaagtggcaccacagtatctgtcttcttaccttacggcaaaagtcatcttccagcatctcaaactagcgaagagattgattcttccataaatctctcatctacttactccaaatggattgtcgacgaagccgttagatggtccaactctcggaacggaacatcagcttcggtttctgagagtggattatctgcttcagaggtactgaatctacttgttacagcttcttgagattggcaatcgttgttctaaatcctttctctcttctggatattgtgttgccatatcagtcgtccggacgagcagattcactctattggaataaatcatctgatttggtactgattgtagatgattcgtaagtcactttacttttctctttgatttgtgcggagtaaagttctgacacaacaatcgtgtttgtcaacaatcagatctgatatgaggtatgcactcaagaaaaacgcctgagtgacttatatagaatatcgatctcacgcgcttttctatctttacgttctcgtgatagacaatacatgaatcaggtaagttttaagtccgtttgcatcctgcatcgagttacgtgtgggtctgataatctacatgaatcaatatagatcttcagttcgttctgtaaagtcatcactgctcgcgatggagaagaagctttggcacttgctcgatcagcgaaaccaagttagtcgacgtgtattcaaacgtaaaatctggtcatcaagctccaagacttatgtgctttaatcttcatctagatctcatattgtccgatatatctatgccaaaacttgatggctacggacttttgcgcgctttgcgcaaggagaatcctgatgaagacgatattgatctcgcgttaattcctgtcatccttatttctgctagagtaagcttatttcttttcttcatcgtcagctcaagtgcacaaagtggctcattcacgatatcgtcaggccggtgacgaggagcgagtatctggtctgctggcaggcgcagaagattatcttagtaaagtatgtgcaatttatttcccaagatcccgttgacaaatttatacctaacatcaattttaaatatccctttttctggtcgtatcaagcctttctccgctaaagagcttattgctcgagctcatcttcagctgcagttgggcaagagcagactggagctggaacgcaacttccgagaacaatctgcggctacgaagttattgtccgatgcttcgccggtcggaatttctcgatggaatgctgatggcgagatcatgtgagtattaacaccttcaaattgtctttcacacaaaccactgaaccggtcgtcgtcctggcccctattgcgtctatgatgactagctatggtacgtgaaatgacttgactcagaaatcacacatattacattttgtctaattccgttattgtattctttgattgatagtgaatgaggcctggagaactcaaagcgggcatccaagggataaagatctatctctgtggttagatagtgttgcagatcatcacaagccgtatcttcaacagagtgagtcttgtcaccggtcgttcatataacatgttaaataagtggtctcaacagttgacctctggattccttagtttataacgagttgttcctggagaagaaggcttcaagttgggagtgtgagtccacgtccgtctattgcacaatcaggtgctatcgaactcattgtacattcttcttgcataacgatagggcaatgggcaaatggcacttggtcattctgccaagctgtgatcatttctagtcatactcaaagtgtaaggtcttaccaaacggtatcactatgcaggcaggtcaggtccttttttaacaaactttgaatttttggtgcattaaacagctcgtagggtaagtgtcaggcttgattgaacataagatcgttgtttaggctatctgtgacgcctttatttgaaaaatcacagtacaatatgtgttttgacagagtacatatcatgatcttgctcatctgatttgatatggttacttattgtaagactgacaatattttgtgtatatagcgttaccaaccagaagcgcatcgaggaagagcgaaaacagaacctgttacgtgccgaagcagcaaagcgagaggccgacgacaaaaagtgcatataacttcattaataatcagatttgaaagacagaagctgaacagaaacttgtttgattttatcgcagacgtcatcaggagtttttggtctccgtcgtatctcacgaagtcaggaatcctgtatctgctatattgcaagtaagttgtactctctccaagatacattgacttctgcccaaatgagctcatttcttgtgtatattggtagtgtgctggtctttgcaagtcaaatttgacttgtaagttgatttcgcaagtcttgacaaggcacaaagtcctggaatatccttgctcatccttacatccatattttctcgtctgcccagttattcggacaggtacgttacaagcttatatgacaatgaaagtgaaactaagtagcttgatcgatgcataacagaactcgaaacagcgctgaatagcggcaaggcttactttcctacgagcgaggtaagctattactcaatcatgtttcaactgtgtctaaacgcttgatcgctaaatgcttcgtcctcatcacagctaattaacctcatcgatgaggatgtagacgccttggaatctattcaccaaatggtatgtcgccattctatagcatcaaatctcggtcatgtgaatgattttcagaatatcaacttttttctcaatctgctattcaggctctctctcaagaacgcattgccaatgatgttctttcgttgggcaagattcaacttgaaagtcttgagatcttcgccacagatgtcaaccttcctgacgagtgtcggaagattatttcagtgtttgaaggagagtgtcgcatgaagcgtaagtgttgtgttttccgactttggatctatgagccgcagtctagctcacagttgccgattcggcgaacatatcagaaatccgcatatccctagacctagttggagaacttgccaaaccggacggtcaacacatttatctcaccgatcctgttcgattcggtcaaattgccattaatctgatctccaacggtaggtatttattgaacacttagccttaaaacctccactgacgaccctgtatcatcactccctaaaaggtattcgatttacggataaagcgtcgatgcaccgccgtgagatttcagttagcattgaagttgccagcgctgcaccggacgacgattcgtgtcgacccccgaaaacaagcgtacccgttacacctggatcaagctgctacatatatggagcggtcactgattctggaccgggtctgactccggaagaattgactagactctttcagcgattttctcaggtaaatcgcctcgatgatttgccctagtattaagtttgtactgatgcctcttacaaatatgtttaggcatcgtcctctacccatgctgtgtacgggggtagtggtttgggactatatgtgtgcagaatgataacttcggtcagtctctcatttcaagacccgattatcaagaatgcgagctgacacttatcggaaacttcagctcatgaacggtcggattaacgtagaatctgtgaaaggcgaaggttggctcttatccctgctcaatttatcacgcggattctgatcttttctcaacgttgttgtatcctcttttaggttccaccttccggttctttatcaaagctgacgcgcccttgtcgttccaacatccccttaagccggtgtttgcttcgagtgtgacaaccaaggtcgttcagttacatatattagttgtgagtttctctcaagttataaatacgagcaaggtaaatccctgtctaactgatcactaatattgatatattggtgtcttcaggtcgaaggtatgtcgatttgatccaacttgctgattgttttgagtcaagtttacaattacactgctaatctatcttatttgatcaaagataaccaaatcaatcaaaaggtacactccagatttaaattcatgatttagaaatttcgtctaacactcagctgctttctcttggaatcaacactaggtcttgcgaagacagctcatgaaagcaggattgacatgtgaatgcgccgatgtatgttcttccttatccccaaaacaatactcacttacttgatgaacccctcctaaagggttctgtctttccgtgatatttgcaggatgggaaaatggccttggatttgatcgttgcgtcccacactttgggaaacaagacctttgacgctatccttatggatcaaggttcgtctatttattcattgttgccatgattcaagctctgtctgtttgataaagacattgaacactcgatcgcttgaatatttaaacctatagaaatgcctgtgatggatggaatcacttccgtgacacacatccgaaaaatggaggacgatggcatcgtaagtgtttgcatagaagatgcatatatcgaaatttcatattgacatatatttttcctcgtctgttgtcttcagattccaaagagagtgccaatctttgcactgacaggaaatgctcgaaaagagcagattgagcgtatgcttgaggttggaatggatgatgtacgtcttgtccatattctttcccgaaagacattgaagatcttcggccgctaatgttgctcttggtttcgtccttgtcttaggttatcatcaagccttataggtacgtgtcatctcaagacagtttgatttcacaacggtctcattttcgaaaagtcttgtttcaactgacccttctctcaatcgcggtcaacaggatcaacgctctcctagataagttatgcactctcacctctcgacagtcttctctacattgtcatgcttctagcaagcagcagcaatgagaatatatttcagtctattcccaatcatgatcctttcacttcattcctaatcgtgtcttttcgataaaggttaggctgcattgccgtaaaatataattactcgttttatttaatttatcatttgctctcgttttgtaacaatactctgagaactcctcggtgtggattttgcttcctcttatcaaatttcaacctttcactttctacttcactctcgcgataggcaagtgaattttgtctctatgattactatacggacagaagttacacatgtagatccattgttcgaagctgataaatctcaaacacggaggttcctatcccccgcggtttgatgctagcttgttgcgtatacttcgaccagccgctcgtttcaacaattttgattggcctttctccctagcaagcctcatgatttctctaccggttgatcctaaatcggaagaattaccgtgttcgtcatcaaattcgtcttcgggttccatttgaccctgccgttgtcgttgattgtcgatgtaaggtgtggtgggtgaagagagtccgacggttgaaacatatgttgtagtcttgttttccgtgctgtattttgcgtgagtggaggatccgatgtggccaacttcatcatgagtcttgaaatcgacctgaaatttgacaacttcttctgggtgttccagcgcatatgtgaacgaatcgtcatgctcgacttcctcctcctcctcctcttcctcctcttcgtctccctcctgttcttcttgttttggatccttcccttcttgcactcctccctcattgattaattcagaaatgaatcgatcgattgatcccggtccactcttcatttggctcacctcaacagaagagcaatcaaatgaatcaccgataccggcttccagcacgtcctttatcctcctcctaaacatctgcaagctaacctctgaagtagtaggagtagatgtcgataaggctccttgaccgaactcagcaatcaatgaggaatttagcctgaacgatgatctgtttctctctcgagaagtgaaagaaggagtgaaagacatgcctgcgctagggctgatggttactggtccagctttgatcgcccgcccggaaggtttagagggagaaggagacttccatgtctggggtacaattgtcggcttcctggtcactcttgatgagagaaagacggatctggcaacgcaaggcgatagatcctgatcagaatctgatcctcggccgtgatatttatatccgctttcatcatcacttccttcctcgccatcttttcttctattgtcatcttctacgtgatcattgtgaagatagtgcttgagtaaaggattcaatcctgccgagagagagggctggtatatcactcgagggaccgaactcgtcaatctagaagcagtcccgaatttgacttgagcctcaaggtttgacgaaattgaaagatcacctgattcgtcgattattgatgatgtcgctgataatgacggtgatgatggcagagatgaagttaagctatcggcttgatcagcctcagttatcggaggtgtatatgtagagatgggttcaaggatatgatgactctgaggtcgactctgacgaggaggggtccaaagggtggaataagcagaaaacgaaaatccagaaatttcatccattggactagaaggaagtggaacgtccattggatcgatgataggtgacggttgcgccaggtataaagatattgctatcagcttaagaggaagagcttcgtgaaggggctggttcaaagaagttctatgcgggctgcaagaagacgaaggagacggcgaagtgtgatagggcaagatgggacataatgatttaagaaattcagggtttgttgcgttgctagaggtggtgacggtagaggtagaatcagaggtggcaatacagaaaggattgacggcagagagagcagactgggcgtccatggacaaccatctcgcgcgagggatatgaacgtaaggatcttctctagggctgacaatagggtcgatcagagtgaagatcttctgattttgagattctagcctctctttgagaggaaatgaccccgagtgttctgcattctccgacgttagagaaaagtccaatgaaaacaagatcgggctgaacgtttcatgcaattccaatctcggaggcaggtcttcattcctatccttctttgccggtgccccctctattccttcatctgatgatatgatccttgccaaatcatactctagaccctttagtggcgagggatctatctctgattctgaaccttcgaggaacccgcttgtgtcatagtaccttccaatgatttgcgatctccaaatcgaacctggccgatcgagctgggtattgataggtgtcagcacggtcgatggattagccgacggttgcgatttcccaactgtcgtcatatctgtttgaggcgaagcaccaactgaagaaggtggcagagctgaaggtctggatgctgaagaataggaaagagctccgatgggatttgacattgtgtgttctatcggtttgggtgattcatctattggaaagttcggaggtgtcggatctaggggaggaattggaataagaggaggcaaggatatggctgaggcgatccgtctgggaacgcgtacttgtcttctgtacccctgtcttgcccacgtcaatcgagtttcagaaggtgccaatatagagtggccactcaagtttgaatttgcaaccgagttgtcatcaagtttttgaaggctgttggtcgggctcgtgggtggagagcattcgatggtgggtagacggctatcgagatcgaatgacttggatggtcgaaggccgtgtctagataaccttcggttcataattctattggagcgcacgatttcggggactaggatttgaaataaagttcgcagactcatataaatcattaggaagaccgtgggatgaataagtgaagagaaaagaacgaacgagtctgaacatctaggatactgttctttttggtcgatgaggttgcattcgaaggatcagcctttgcgtcaaacccacgagttccctcatgagtttctcctgccttggacccaaatgagatttctcctcgacagacatccaaaacctccaacctctcctcccaactgacaccggttttactctttctctttttccaagcttctctctctctttccgctcttgtctgttccatccgactgttgattgactgttgctcaaaggatagcttgcctaatagcggattttgtacaatctcgatgactttgggaaggtctccgtcgagattggctggttccctaacattcaagccaggtggagaatcgagtgatagacctggacggatgcaagacgaaaaacccggccttctgaatgtcgactttgatgccgtcgaatgagaccatgactgaagagctcttgctccattcggtcttacctcaacattcagatcgagactggtgaacaaagacgtcgatacgataggagattttgtggtcgatccgagagctttatgtttcaattttgagaaggatttgattggtcgaagtcgtttgatggactctgaggagggaaggtatgacttgagcctagtcgtcagctttaccggtgttttgatctcatcgaccgatccagtggtgtggtaagtttgagtttggacgaggttttggaccaagcgatcggtgagaacggacgagttgggtagagacgagagtacgcatattgaggaacgacccaagggtgatgttttgtggttggcagaagagtctgagaacgacacgaccgaaggtggttgcagtattggaagggaggagaattgattcatttgttcatatggagcttttgaagaatattgcagagggtcgagagcagagtgttttggacaaaagaagactgggcgacggtcgtttcctgaaattacttcttgtgggatggatagggaaacgagagatcacaacaaacgaccaagtgagagccaagacagaacgattcgttcaacacaaacacgcgacgcgattttagatggaagaagaggaataatatttcgccctgatcggtcgctggtcaatcagggtcctgaacggaaaggggatcgaagaagagggaggaagtgagactaatcaaagctgacgatccacggacatcgttagtttgtgatagctcatacagtttaggaccagatctgcaagagtatcatcagatcgttagcaagattctgttagtgtgttacatggggaaagttggtatgaagcataggtaggaggaggacacgaaggatcaagagagcccagaggacgagtcagggcggcagagtgagcgtggagaattcgaccaggttctgaccgtcagctgttggcagattccatgctgcttgacgatgaatagagatatctatctacagtgtccttttgcacctctgcgttcagttaaaagaacattcactgctcgaacacgatcgatcaacaaataggccgggtcagtcaagatgaagaaagtcaatcacacaacagtggccagatgaatgaaatttggatgaggattagaattgaagggaaagtcattacgggggatcgatcgatcagaatacaaaatgtgatagggaatatgttaggagatgtattggggaatgtgtaacgatgtgtattagggaatgtgttggagaccaacagaaaggtggactatgatatgcactacaagacgatctagtgacttggcacgagtcattacagaatatctactagatggtctatcacaaattgcataggacagcctctttccatgactctgtggatctgttcattatgaagctcacctcaaactacactatgtattgcactgaagacggattgaagatgtgcacacatttgtgtattcagaggcgctattgattatactgctaagcgaggaaaccgcccagctcgataaaaggtttctaccaatctgtggctcagcgggtacatcatactatccatcgagaagtcatactatagacttgactacaagatgtagttcaaaccaaagatacagatccaaatagggaatctttgtagtgctaaatacagaccaaattaaaagtgcagaatagaaaatcggaccaaaactcattagagcacttactacaaaatatcttcaaaagtgtattaaactgattttgattccgagtgccgaaacccgtgcggcccttctcgttggcgtgttgagctgatcgtcccagctgcactcaacatctctcccttactctcactcacatctatccctttcttctaggtcttttcttcttctcatctcattcctctcacgatggcgtccaatttcattgggtaaagatcttcttgctctgttttcgcatgttgtgattgttctgggagatcggctgactctttggtcttccatcatctttttttccttctctcgctttttttaccttctcttattggcgtctcttgccctatatctcatcttaaacacatccatatatgtcctctaatgcatccagtgcgatcatcaccctcacttccgtcagtgacatccgttacgttggacggctccattcgatcgaccatcaggaaagcacaatcagtcttgagaatggtgagacaatcttctactttctcaatcgcttctttctcgtgtcatatcgaacggtctgtctctttctcccatagtctcttccaggggtactgaaaacaggaagcctcaaaacgaatacgttcctcccaacgaccgaatttatgacttcgttgtcttcaggttagcctttcctgtgccttttccccgttcgtgtgattgtcgtctaaactagatacatcatctgctggccaaacttttcaattgaacagagctaaggatgtcaaggatctcgccgttgaacaggctccaccacctgtgacaaccgcgtcggttcccgatgaccctgccatcatgggtgtaagctcaatcgacttttcaaaccctttatcactccctcaatcccattgcccacgcctctcggtttgctgatccgtgcctgaatctttcattatcttacagggtaccactcaatctcgacccgctcctcattccccttccaatactcaggcttaccctcatcctgcatctccctacgctcaacaccctttagggcccggtgggccctacggtggttaccctatgcctgccgggagacctcctagcggaccacctcccggagctgcgtggggacctcctcccccgcatgggatgtatccccctcctcctcctcccggtccttacggtggatatgcgatgcgacccgggtacccaccttcaccggccggtggaagtccgctgatgccaagaggcgtcaacggagcccctgttccctctcctcagcaaccggctccccttcctacatcctcggctgtaccctctggttccaccgctgcttctgctgctccggcagcttccgcccctgctacccagaacgcgccaccttcaatcccacaagctacaaaaccgactgctgctgaagtctctattcctaagtctgccccaacctcggagcaacgcaaggatgtccctgcgcccccgtctggtcctcgatctcagcctcctgctccttcttctcctgctgccgagaagaccatctccgagcctaaagccgaaaacaaatccgctgcttcggttccggccactgctgctactccttcgggtccaagcgtccctcctgcactgatgcagaacgccgcccagtccaatcttgacaagattgagcaggctcttggtcagatgtccatgtctgcggctaccggcccggttggacccactccaggcaatggtcttccttcgacccctgccgccttgcctcatacccgttcgggtggcggtcgaaaagacgggaacaaccgaggaatccgacctcctcctccccatcacgcattttctaacggcggccatccccgcggaccaccgcatgctcaatcccagtcataccaacagccctcgggccgaacggtgattccggctgccgagtttgactttgccgagtccaatgcgaggttcgacaagtcctccgtcgccaaggaagccggtggggttgttgattctgactcggatctcgactctgatgattctgacgacgaagaacctgccgatccgtccggacgagcagccaagccgcgtcgacagagcgcgctctctgctggtggtggtgcggccggggcgaacaaggcccaattttacgacaagacgacctcgttctttgactcgatctcgtctgatctcaaacctgaggctgataacggtcgaccgatgaacgccggaggacaggttagaggtcgacagtggcgggacgaggaaaggacacgaaacatgagtacgttcggtgaggtcggcggccaggttggcttcaacggttcaggtggcttcaatcagggtggaggtagaggtaatggctaccggggaggcagaggtggtcgaggcggcggacgaggaggtcggggaggagggtcaggttggaacggcggagggtacgaacgacagtataacccccgggatcgataccctcaggatattcagtacactcaaaactaggcctttcaggcttattctcagtctaatccagacacgctttccaaagtaaacgcagccgtctgaaacgactcacgtttcagcatctcgttcaaatatcctcagccatttgtttcttcatatcttttctctgtcttccccattcttttcttttgggcgcgaatcatctcgttggaaatcctgactgttatcactctttttgggtagcacctcttctctctcatctccatgtctcttttctttatctattttcttccttcaatccgttcttcttcatgtccgcttgctctatatatctatcaaacctctatcaagctccattcacaaagcacagacgatggatgattgaatgaaggctttgagcaacctgtgcaaacacgtgacggaatatcgattatgtcatcatttccgtttcgccctagaccgagtttgtcagtttgcccggctgagaatcatcaaacgtctaatcgttcgtcatccatcagcgcatccaaagtttatcccctccgtctacataggttcgacagatcaccaagtcaggccagcagaagtacttagccagatagatcatcaagctggagaaatcagggaaataaggaaggatggggctgttgaacttgttgccgggcaaacgcgcgacgttcaacttgacggtgctgattgatgatatacataacgttccgctcgtaaatgggtctctctcgttcgtctctttgttttttcctcctttattttctctgttctcagtccagggcatcactgaggatgctcttgaatccaccgttgattcgagaggcatttgctcgggatctcgggaaaaaagagtcatgtcaaaccaagggactgacttcctcttgattgacttgtcgttgcgtacggatgttcatgccaacttgcattcgaggtagagtcagatggaggttcaagaagtatcattcgaaggacaccgaacgtttgtctttctgattgtattcttcctttgactgtttgagaagtgcacgaagtgcttaatccaacatccctcctgccttacatcaatcactatgtacggctgatataatcaccgggttgatggtggaaaccagtccacgaggcgcaatctcccactcctttgtctactcctcctccggatgaagatcaagcggccgaatctaaccccttacaacgcataatcactcttcagagaatgatcacccaaactcaaacacaatctcaaactcaaggtcttgctggtgatcaggccagcactcactcccgcgattcattcgattataatgacgaagacgaagtctcatcgtcgtcgtctatatccatctatgagaacaagtcctcggcaaacatatcagcttcatctacagacactcagtcggaaaagccagaaggaagactacaaggaagactacatggatggaagtctcgaacaaagaacctcaagaaatcacttttgtcttctgctacaacggccagacagggttcaacacacgatgagcaaagatcgcatgactctgcatctatcaactcttcgcctccggatttgttgtttcatctcgaagcaaattcatccgacacacggggcggtcctgactcatcagccacaggtacacacacgactactgttgaaacgggttcatcacgtgtgccctctgtatcgacaagaggccggggtgagaccgcaaagataccgatcggtgatcatgcttgttcttggtctcaacgtatcaggagcggaatccagataccgataagtcgggatggtgtgctgggagaacgatggttgaaattcatcgtcatacaggtgagcgccggttttgcgtgtgtaggtgtgtgtgtgtgcgtgcattcgatgaacgcgcgcgttgacaattatgtgtttctttcgcttcatttttaaccgtctactgtagcacctttctccgctggattcctcgactcatacggaaaaagacgtattacttggacatctagagttgaatctagccgaatatgcaggatccggtccggtcacgagacgatacttgctagatgaaggaaagacgaacgctacactgaaagtgagttcaattttttgttctgggttttctgccaacttctagtaacaaatctttcgtttggtctcctgatgacgattggatcgaattcaggtttgtattgagcttgaacaagttggaggtcaaagagaatggaatccgtatgtccagccgcacgtttgttcttggtgtttccaactcgaagacgcgaccttacctcttcgacatcggttgtacgcaggatgttaatcacgaaaggacaaatctcgggcggcggactagagtcacttgtaggacatgacaaaggctctttagcaggttcatcactctttttacatacacctctttttttttgcaaactttctgacctagaggacgaggcctgattccttggtgtttttatggggaatgctgttcgcaattggaacactctctttgattttcttttcaatgataggtactcctgtgatgtccagcgcaaacctgaatcgactctgtgccgaagtgagtctagttcgtttgatctcacccaggaagatgcgtactaaaaaaaccgccctctccaacaggcccgaccatcattctctagaaaatcaagcgaacactcctaccctcggccctcatcgctctctcattctaccaattcggccccgggtccatctacacctcctcttcaaaccctcacttcatctcacgtcccagcacaaagctcccacttgttttcttcctctaccaatccaggctcgtcaacgaatctccattcgttaggtagctctcttcagcatcatctactccctcactcgaaaggcaactcaagttcgtcctaccggaaatcacccaatcactcgaaaccatcctcttcctcacctcatcccgactctcaaccacagacacgaggtcgtcccacgatcgacagaccacataccggactctcgggtcgggacaacaagtcccgatcgtctgggttcgtggtgccgtcaagaacggaggatatcatcgaggctttgttcaatcctttcgaatcatcgaccttggggccgttcactgttccgtattcgcccggtgtcgtgagaaagccgtcggatgaagtgatgggcgaggatgggactggatatgaggcagagggaagtataggacacaggggcaaaaagaggacaggctggaagtcacatcataaagacaaggattcggctccgtctggtatgccaggtgcaataccggcaggagcggcaacggctctgaacagagacgaagacggagatcgaaagaagaaacataatagagagcatgggcctaggcagacatctgggaaaggctttggttggaaaacgaaggaaaaattagcttcgacgagtgaaattcggatgtgagagagggtttcatgtctttgatactatgagcctttcggcatcaagaagaacaagagcggtcgagccaagaatcatcgatacattgaatacaagaacgaatacaagaatatcaagaaatatgacaaaggagttgtccattcaggaaagtgatgcaaacaaagttgatcatctaggcgatgacggatcctccattgacgtggatctatagtgcaacgtagggacccatgctcagtatgcgtcggggtcgatgtcgtgatactatattcgtaaataatgtttcgaaaaagacacaggaaacttacacattgaccggagatgtaggatgaatcattgctcgccctacgagaacgattggacgatatatgtactgagcaagagggatgacatagatgacaaccggaaatgggagcgatagatgcttacaaaaagacgaagcaagtggcgcattctacaggttgtccaggccgaccgatctggaaccaatacgcgcatcaaacgcacccgacgatagtcgagaagaacaaagttcagcatgattgggagaggatttgacatgtcagacgaaagcgtaccggagtggtgattccgaatttctctagggactctttggtcatcgtagcatacaccaaaggcgtcacgatcggtcctgggcagacggtattgactctgatcttcttctcgctgacgatctggttgctgagcgacctagagaaggcgacgatggccccttttgtggtggtataatccaacagacctggctgaatatagagacgatttatcgaaagagtcaggctgatgcgtctgatcgggagaataagcggctgatcttacatgtccgataaatggattgatgctgagttgaagattgagcgaggagaaagcaatcaagatacatcaagaaacatactctcgatctgagaactaattcaattgataaagtacctagcattgaaaatgatcgatcctccctcagggatgtgaggtaaagcccgcttggtgatgtaaaagatggcattgctgcaaaactcgaggttgattagcttagggttggcagatcgggtatgttctaccaaggatggctgctcacatgttgacactttgagatattcgaaatatggagaggatcagttagaaatagagcagcgcatgtattacttcctcagtacgggactcggacacgtactccatgacatgcctccactggtcggaaggaagatcagagatatgttcgacctctttctgggtcgccgcgttgtggactaggatgtcgattcttccgtagacctaaggggcacggctggcatgagcctctctggatcatcaccggcaaatggaatggctatgaagggagcagattggagaacgaaccttgatggcctcatcgacgattgcctcgcaattctcctcgaccgagatgtcttttgcgatcaaatgacactttctgtggggtgcttcgaccgagatgatcgtctttgtgtcctgggcgtctttctcctcgtttggatagtaacacagcacgaggtcagctccctccatcgcgaacagaacggctatggacctgccgatcccagagtcgccacctgtggttctcgagttgatttcgcaaagataaaaaaagaagaagaagaagaagaagaaatgaatcagcatactcgtcgacttcccgacccttgatcgcacaaaagacgacaccccgaaccggtgatgagagcgatcttgtcgaccagtttctctgcaggcttgtactttcttccatcggcctgcttcagatactctggcggctgttccattctacattctttgccactatgttgatcagcggtccgtgaagaaacggtgtgcatcagtctgggtttatccatccgttcctgtcacactttatatcatgagaatgtgcctcggactgaatcgagagatacgaacggaagggtatcttgctgtatgacatcgggtctgtagccttgctcgaattgtcccttgtctgatgacatgctgtgggtttcgataatattcagtagaaagagaggatgaggagatcaagagatcaagatggttgtagatggggaggatcgatacgacgagcgcaagaagcaagaagagtcgtcaaccctgagacgtcaagacgcgtgcgcatacttacgtcatagatcatttgaatgtgccagcccaagatccttcgagtttgatacattgttcattcatctaatccgataggagcacagtccagcgtgcatcaaggtcgtaaacagggaacatgagacgtatagaagatgaaaggcgtgaagagggggttcgtgaagatattgaatgagaagagagactggattctaagaacgaaagatcggaaagcagaggaaggaaacgagtgcgccaggctggagatgatgagatattttaataaaaagatatgagatgatgagacgaccatgccatgtgtcaaacgatggattggtctttatc

SEQ ID NO: 3204 - DNA, 5159 bp, Xanthophyllomyces dendrorhous
taggttaatttccatatccttgcctccgttgatgatgatgatgatgataatagtgatgttgttgttgttgttgttgttgttgtcgttgtcgttgtcgttgtcgtcgtcgttgtcgttgtcgttgtcgttgtcgtcgtcgtcgttgtcatcgccgtcgtcatgatggcccagacctactcggccaacgggatctggatcacaaagcctcgtttcggcatttctcccacagactgcctccttgattgcccattcgtttcggcttctgtgctggaccaactgcattcatacatgtacatatcttgactcgtctgtctttcttgccccgcttcccaactttcacacttttgtccggctgccggtcgctaccgttcgttataacagtcatcatgctggagtatcatcttccatagtcgtcgcctcaaatgaacgcgtctttctctctgtctctgtccctgtctctgtccctgtctctgtccatatccttcttctcacggaactttgtcagatgccatggccaaattgatagtttgcgtcaacagatcgtcaatcgaacggtctctaacagatcacacactctccgtctggtccacccatccccggtatattcggcattccatccgatcccaaatcctaaaacacatggagatatcaataaagccagtagaataagtcataacgttcatagcgcagatcaaacaaatcaaataaggagagaaagaaggaagaaaaaaaagaagaagaaaaaacagacgcacgagtccttcaggcatatctcccataacctctttcggcggagatcctaaatcttgcatctatttcgtgcaacgaccagaccgacatttcaaaatggctgatcagcaacacacacacataaatctgacccgaaagaaataaacagaccttgcccatcaactctctcacttccgctctagtcgattcgtcctcatccgagaacccaggacgttcaaacaacttgataatctcgcttaccagtcccgcctgagattcgtacacatggagctgttccggcgaaatttttgatgcctccggtgacgacaaataagcagggtactgattttgttacataaagaaataacaaatgaaagtatgatgtgtttagggtacaaaacacatcctcacgcatagatgccaaatcatggcaaggaaaagaaaaacaaaaaaaaagaataaagagaaaacatacctttgaatttagctcactcagaggctcatacaagacctctttgctcatcagtccatccatcatgctctctagcatgccttccccatctagatccccgtcaccaccgcctaggccgcctagtgaagccaacaaggctgccagagggtcttcctccgagtcggaagcctaatcgcgaaaaaaacagatggtgtcacagaaagaaaacagaggccaattagtcaaagtacgcttcgaaagacagcttccaaagaattaaattgataagaaaaacaaaatcaatcaccttgttggtctccgatgaacgtttcaatctctccatcgtttctttgatgcccttctggaacccatcgctctgatctgccttggtcgagctttttgagcctgtctgcccagaggtcccttcctcacttgctttcgactcttccagtgcctcctgaaagaccctatcccaagcactcttgatcgctgccatatcctccggtgggatatctgtcggctcagccttcgtaggttcaccaccagctaactcttttaacagagattccattccttttgccaactcggatgcgaacgcatcttcgagaccttcctcgtcttcatctccatcctccccggctgctttcccatcggctcttgcctcggatgaggtcatttggcttgctatcgaatcagttggacgagcagaactggtggagacagaggaagccccgggtatagaactcggttcagccaacgaagggatcaagtctaggtaggcagaatacacggattagcgagaaacagaaacacaaggtccgacaccgagacgtgggtcagtcgtatcgtccatcgggaatcatgaaggaccaaagaaaagcaagaatgctcgcacgaaccatccaaatcatccaaatcttcatcgtcttcggcttccctctgtttcttggcatctgacggagcactcatcattacacgtatgcctatagctgactgagcttgttgagtagataaatataaggtagaataaaacggagagaacaaagtgtagaagatggtcgatggttgatgtccgaatgagatggctctctccctccaaaaaccgagccggttcaagccggcgtcttgttttgccggttcattcatttgcctcccgagtctgcgtgagtacatcccattcgtttccatccgccttttctctctctctcgcgcttcgatcacatacatcaacacagacgtagatagaccgttctgatcgtgaagagctcataagtatcgttacatgtttgaggtagatgctgccgaggaatcatctcccttttaaatccttcttggtatcaatcaacggaccaatcgcgaccacaccactaccctcactcggtggttcgctcccttcgcttccaccgatccctaacagatctctcagcaccctgttctcttcttctaatctaacaatctcggcctctctttccaacgcccagtccaacctggtttctcctaccgcccttccagcggaggaaccgtccgtcagtggacgagcagagagagaatatgacgggggaaggagaccaccggatgaaggtagttccgacatggccgaccttgtggaaagagagcaagagcaagaatcagcatttctactcaacaacgtcaatgaaaagtaaaacagagacacaccctccgtcttctagttctccgttctctaaacgcatcagctttctcaacatctctcctagtttcagtaggcccgagttgatctgagtagattccaggagcgactcgaccccctgttggtgtgagagacccatcaatgcggttgaataatgtttatgtagttccaactcgtgtgtttgattcgagtgcttttttttaataaaaaaatagaaaaaggagaaaaaacaagagagataggcaaaggttcccttaaatatttacgcttgataccaccgagtatcaaggagaacaaatacgagtggcaaactcacagcgagacctctgaattttcccatcactccttccaacgtagcttcatactcgcgtaacaagatcgacagttgcttgttctcgtgggccagcgttcggttctctgacacaagctttgtcgaaaactcttcgattgccgactggtactcctctgcacacagagcaaaaacaaaacaactgacgatcaacggtccgatcaacagaaacagtaacacggcaagattctgatctggacagaccttgagtgagatcagtgttgaaccttcttaacgggaatccagtgttcgcatggacagcttgattctgaattggagcaaagtcatcccaagaacaggcacaagatcggatacaacagaaagagattcagctttgatcagtcgatgcacatcaaggctacctcattggacctctcacgtcccatacaacccaccaccagaatgaaactcatggtctaccttcacttcggcaatctgctcctgtagggcagaggtgaccgctctgttttgagtcagttggtctgataattcagtcacaagcgcccataactttgcgatcggttcttctgaggctgcgatgacggtattaaatgtagaagtttagaacacaatgggctctaccgaccaacaaagatctatcttgaagaataagcaaggaagcatacacatctatgtgtgaaaccgtcgattggatggttgaattcggaagcaggagctgaatgagagatgacttgaacgacacttttatgttttaaatcttgtgggtttgtatctgcgtgtccctcaaccaatccagttgatatatacgttcgatctctagagaaagaaggacggtcgtcggagatgatggcaaggatggtggacagttgatgatggttgcacacgaaagaaactccaagaaatcaataaactcgttcaacacccatcatcaacatcgacactcatcatcatcagcagcagcagcagcagcgacaccactaccgctggtcattcataaagctacagcgacacacaacacatagatacaacagaagtgcccaaaccttactttctttcctagtttgaagagccttgtttcacattgttacatcgtgatcaccgtctctccttcgttccttccctctgaagtgagccaccatggaagccaaaccaaagaggaaggttagttctcttgacacagcttgctctttcgagtctttaccctcaaagaccgctagcagtatctttccggatccaaagaaagacctgaatctgctcaggaagtttcgtgaggcatacaaccatcactgtcaacgatacagttgagctatatgaggtccaagaagagacaggaagggcggaagtgacgtggatgacccacatccggaggggagcaaacatcctagttcactctggcaccagctgtattcctacatacataacagtggtctcctgtccatcagcaacatagttctcttgggtcgtcacactgaactgaccctcttgttcttggtcgaacggtgtgtcaaaacagatcattgggaccatccaacgttcctcgcctgggccttctcctaatttagcccatgtgccgactacaccaaaactttcattgccaaccagctcttcgccatccatatcgagccgtccccgtctgacccctacgtcttctgttcgtggcacgcccacatctgtcaccctcaatggacatcctcctaaggcgcgctcaatactgtcggcctcgaccggtagcacgtctggttcaactacggccaaagcacgtgtgaaagtcgctccgagctccatcatcggcgcgcctgcatcttctttaggctccccttcgttcccatccggttcttcttctagggactatgatcctggagaagcagctgtaggagcggatgtcgtcggtcgaggctttcgaagttccagtccggtaggcagtaatgtaggatcgctcgtatctggtttcggaaaagtaactagtaaggcgagaagtacagttggaacacctacaaata

SEQ ID NO: 3205 - DNA, 14317 bp, Xanthophyllomyces dendrorhous
gtccctggggctaggtcgtatccggctgtgagcggatctattgtgccggctcctgctcttccatccattcaatcatcaaaacaacagtcaagctcaacagcgtatgcaacatcttccgtgaccggttccccacttactgcttcgactcctgcttcgtccacctcaaatcccttgaatggatcaactgcgaaatctttagttcgagctagaacaacaccaaatgtccattctccagctgattactcaaccttctcctcttttgcgcgtacctctcccggtgtatcatcaccatcgaaccaacctgtatcaggctcttttagtccaccaacttcttcctccgcctttctcaacccatcgagagttcaatcaccaaacataccaaatccatatcatactgtcggcccgtcggcaaaagctcgtccgatgtcctcgctcccaggtccacactctccgaaccttctgtcacctacttctgccaaatatccagtcgaccatccgaatttgtcccccatagctagctcaacttattcgccatatctatcgagtgaatctccgaagttacctccactgtctccctcccattacccaacgaccggttccttcttttcacccgttctgaatcgtacccctcatcgacgttcattcgattcaacatcaactttatcatctgattctccagacgaatcgtccgcccatggggagtcatcctcgttttctgagatctccggtgttcagccctcggctctctccaaaacatcggatgggcacgagacatctgggaggtcccaaggcggggtaatggtgcttgaaggaaccgacaacagactcaacagtggagaagcccattcaagcgaaacagctagaacgatggatagactaggagatgaggatgatatggaggatggcgtggagaaggaggaagcgaaagtgaaccgaaaggtatggttcaaagtctcccagcctgtgtatattctctatagcttagtaacttgaccaattaacatatccttcgattcttaatttctaggttgccgatctagagatttcgaacgctagtttgcttaatattaaccacgccctagaagccacgaaggctaaacaaggtttgtatatcgctccacctatctctactcgattctatcttcctaagtgtgaataccaacgcgctgatatttgcaactctggtcgttctttcgctcactcacctacttagccaaagagattcgggatctccgacgcaaagttcggactggctcagtccagcctctccctccgctcaacaaacgattacgcgctttgacctctccacttctctccacatcctacccgtttcctgccccactcccctcttcctccgagggctcaggcgatgatgaaagtgaggaggaggaatctgatgacgagcaattcgtgagaatcaaagaggtcatgctaggactcttagaacaagcggtccaagcggttcagcagcctcgaccggtgccgagttggatagaaagggaccgtgaccgtcgaggatcgatcgcagatgggttagagaagagtgtggggggcaaggtgctaggtattctggagatggatgagtacagggccaggaaagaagaggaagaagacgataacaacgacgacgaggaaagggaggaagaagatgctcagcagagcgcaagcctggatttgggagatcagactttgcgttttggagatttgagcgattcgagagcgaatgctttgcgtataaatttgtctgatgaggagaggtcgatgatgttgtagacctgctcgttcggcttttgcataattcttttcatatttatttcacttttttccttcgttcttctatccttctttatccctatgtgaacccttttcttttgcccttacctttgctcccatactctgtatactaccttactttctttcatgtactcatcccacccacatagacatctttataccattacactcctgcatcttactccagacatgttatcttttcaccttccttcgccatcaggtttacgggattagatttccatcagacgcaagaaacgcgtcgagacgcatccgtcaagatgacgtcgacgcgtttgtttctcgtttaatcgaaaagggctgcttacttctctgctatccgccgacattctcactttgtgcagatcagatataccgttcatctgcgtcgcttccatctggccagcatgcacaccttgtttgagcctttctcagaccttttacctaatccgaattcaatgtattctgactcattgatatttccaaaagccgcttgggaatctgcccttccttcgactgctgcatcatcgtctgggaccacaataagctccttggacttgaatagcacatggcgcggaatatcgctacctacagagctcatcactttagtactttcattttgcgattcttcaaccttggccgcttgttcgagagtgagcttttcgtttctccagatcgcaggaccgatattatacgaggaggtcattttggacaagtacgcaagttatgatcaattgttttgtaaacgagtaggccatcttgtttccaagaaaatcaagtacattcttcttcaagctgaccctttgccccgttttttcttcttttttttgctttttcttatgaactgagaaaagacaggaaagaaatgctttgagcatctagaaccatggctgtcggtctatcagatcaaatctctttcgctcgtcactcgaccatcgacagcgatctctctagatcgattcatcagcttgagtagtgaacgtattggctccccctcatcatcatcatcatcatcagcagcagcagcagtagcagtcaagcctatccagttggagacattatctgtctcgttgtcatacaacggcttaatcggctacgcgccggtgttgaacgttgtgttacctgtgaaccttcgaatgtatcctgcattcaaccattcatcgaagttcacattcgacgccgaccggcgttcatgggaaatcttctcaagcccaagctggagaatctcactaagaagagtgtggctaagtggttgttgtttgcgtgtggtggagagtgggggaggaacgttcagaggtgatcccttgcgtcccttggaagacgaagcacatggcttatactacaaccccgactttttcctcgtcccatcccgggccgaacgtcttgcgatgaatcagacagacgacggatctcgaacggtagataccccgacatccacaccgctctctatcgtatttgatttgacgaaacgatcgagattgacgcccaaagagttctacacgctctttctctctcagcggcggacttcgggtctcttctcagtgcctggtttgacacaggagtctgcagtttccgcagatacatcctcctcctccttaacttctcaagaatcaggcttcatgccatcaacgattacaacaaagtatgagaacggaatgacgattttggtcaagcgagagagtgaacgtacgtggatcgagagtgggctaagggcacgctcagagggaacacaagatagatttgttcgtgtactagtaacatagttgaacagaccgtgtcgtcattttggttgtgtctttcattcttcaattcaaaataagtctatccctttgttgtgttgtctcttgcaagtactccttgtacaagatatataccaatgtacttctgaaacctctatatacggtggcccggtacaatggacactttcaccatttgtatgatatctatttcgaaggggacagatagttcgtccaccaggtctcaaacgactgttcttccgtccactcgatcccattctcttcgagacacgtcagatcgagttgagtatcctaatagtcagaacgaatctgatgagcgtttggctctctatggacatttggtatgtcaggagacataagatagaaagaaagatagaaagaaggtgactgaccttgggccgaataacacctgcagcaggctcggttccatcaggaatgatgtgcgaaacttcgacgcccagcgcctgggccatgacggtgcacatcgaatacttcgtgaaaggtcgtttggacgagaagtggaggatcgaaggtggaagctccgatgaggtcagtgaacgagggaatcgacgagcgattcgcaaaaggcagacggcaacatcatggacgttggtcggatatctagtttggtacgtatccactgttgaatgacatacacgagatcaaagtgcttggtaagaatttggtgattctgaaagcgtagaacgaaagagaaagatgggtgaaaggcctgcatacttttgtaggtcttgcctgatttatcattcacgacgtccagcaaaacattcaccgctgtttctgaattgtattcggcctctccatagctaggatggaaagttatgagatgatgagcttctctctgccttgcgcgtaggtcacatacacaatcgtacacacacacacactcacaggatgggtacccgaaggacaatcccttgtcctttagagttctccagtactgcaacctcaccctcacgtttggtgataccatagaactgcagtgggtttggtgcgtctgacgtcttgtatggtgggctaatacaacgagcgtgatgaagatacaaggaatctctgagtcatgcgctgctatggcaacctaagcgaacctgcaagagagacgaacctggtgccatcaaagacgtctttgaggagatgaaacagaacggttcagcaagggcgccaggagatgacccaaaaggccaccgaagagacgaaacaccacaccgtataccacaaaacacactgggactcacaatctgtcgagatgtaaatcaaccggaagcctttctccccggctagtctcgctagatgggcgggcaccaacgcgttgagctctctggcctttgccgggttctcctctgcggcgtctggcctgcgctcagcggccgagtggacgacgactggggatcaagagagacaggcacaacattcagctgttcctgaatagtgagtttaagggggaggggaagatagatttccgatcagggcaggcacaaaccatccggattgaactcgtcaatcaacgccctgaccgcttcagggtccaacaggtccaacttgaggagctggtcagtggaccgagtgaatcccaggcctttgactttattgagtgtgtccagagcaaggaagaggacaaggtcaatttgtgggtcgagagaatggcttgtatacataacggatatacatcgacgaaccctctacatctggagctgattggaacactttgagggtagctcgaccgaggagaccggatgcgcctgaaggatagatggcaggtgtgttcttgctcagtcttgttctttaaagtcagactcgattcaattcgattcagtcaccaaagaaactaacctgtgataagaactttcatgatgagatgaacaaggattcttgtgtatctttgtctgtgtatagaccagagagatttcacccagacgggagatgacggaggagggcttgaaggaaggctgattacatacgcttatgcatttccagaggcagcggcacacggaatgaaaaatccgtacagccaatggtagccaggctttacccatcgaattctctctcttctcttgatcgtatcccgaccgttcaccttctacccttgtcgtcgttgccttcttttttctttttccccaactcgtccctcgcctctctctagatcgtccatccgtcttctctacctgtacctttctcgagtgtcaatatgtccgccgctttccgatcgtccaccaggttcatcaacgccctccctaccgcctcgctcacctcgaggggagccgctcccttttccaagggagttagtgtcaacttgatcgcccagcacgattcccacggtgagtacgatcctatgcaccgagccggtaaggctgctagctttgccttgaagtttggaaggtctaccgtcaggtcggggatcaatggtgaggatccctttttctttttttctctccgtcgggtttttttcttctatctgtcttggatttcgcagtcaagaaaaaaaaaacttgccagagcacatacccgtcttctgaattggacatcactcgtcaaccattgtcatctgctcctttgctcgagagcatcagagaaatacagaatccaggagaggtcttttcaggaggttgtcggaagaaaaaacctcgatgggcctttttttcctcagatgttacgtcgattgtgttgatgcggatctcgcgattggtcctcttttctaccatatctgaacgtccgagcgtttccgtcacatcttcatctatcaatatctcttctctacatcccgtctcgtcactcgcagacgttcgaccaactgagatggctattggccatgatcaccttttgacagttgagacagagcgacgaatgctgatttcttctgtcatttctgttgtcactccgactttttctcttagctgctccttccgttggccgacgaatgatccacacctctgtggctgccgagcgagaccccgttgccagcccggacttttccaagtaccgagccagctcttcttcgacgaaccgaaacttgtcctacttcatgatcggttcgatgggaacattgaccgctgccgctgcaaagtccaccgtcgtcgacttggtcaccaccttgtctgcctctgccgatgtgttggctcttgcaaagctcgaggttgccacttcttctatccctgagggaaaggtgaatattccattttctttctgctgtattgatctgttctgtgggaaagaaaagagcaggagaaagaaggagagacaagacattgatggcttacgtttggttgttgttgtttttccgcctcgctcgcctgggttgctatgatgatatagaacgtcgttgtcagttggcgaggaaagccagtgttcatccgacaccgaactgctgaggaggtcgaggaggccaacgctgttgacatgaagaccctccgagatccccaggctgattccgagcgagtccagaagcccgactggtaagttgctctgagtttatgtgtctgctggagggggacgagtgttggagggggttacagcaaggccaaagaaatcgaccacaagtctgatgacccgagctgccaacttttacaggctcgtcatgatcggtgtctgcacccatcttggatgtgtccctatgtaagtcatattctacccgtttatatgagaaagaaaggcagagatatgatttctgaccgaccggataccgttggatttcgactacaacagtggagaggctggtgatttcggtggatggttctgcccttgccacggatcccattacgatatctctggtcgaatccgaaagggacctgccccgctcaacttggaggtccccagctactcgttctctgatgacaacgagaccttgaccatcggttaaaaagtttttctttcttgtaaagaaaacaatcaagtagatgtgaggagtgtgagtgtgagtgtgagtatgagcgtgagcgtacttggtgtgtggtgtgtggcgggtgatgtagtgtggacggcgaggagagggagatggatggacagacagatggatgggtatacagctgagacagtgtttctcttattcgcttgtcctctttctttctctactcttcttgtttactcttgcttggtgtcaagttccattgtgtttccttttcttctctagtctcttttgttttattctttcattattccaatcaacatgatttaccgcatcgccgtgtgagtgagagtaagaatgagagtggaagtgtttatgggtgtgcctttaagtcattgtggggaagaatggtcgagggtgatgtgcgtgttggtccatggaaagagcattcactcgatacttcccgaacgaaaggatgtaaatagagaagtaagaaagtgaatttaagagaaaaaaacgtgcaagaaaagggactttgaaggaaacggagaacaggggtaggggatgtaattcagagttaatagaaggtgaagagacgagagagaatgaaggtctgaatgattgaacgtacgtcaatagagaaagtgtcgagcaagcgattaaccctagtcaactagatcagttaaaggaatcagataccccaaattgaaagagagcgcgctctctatgaggtgtgggcaatgaaagaaaaagagaatacagcaacaaaggaaacaaacggcctacaagagtacatgtacagggacggaaagagggtactatgcacagattggttagggtttatactcttgccgttcagagtgacggatcggcctgacgagcctggtctatccaatggatccgaagcttttttgtttgtccgaaatgatgaggagaggacggaaatacaatcggaaacaagccgatggaaagacaacgagaggatgttttgtattctggttggctcgtttatactttttttaataccttttcgattaaagtcaccactttttctcctttttcctttctcttctttagtcttttcttctctccttcttagtaaatcttgatacagcacattcaacggcgcacgcacacatacacatatatacttacatgctctcacgctcgcaaaggccattttggagggcgcgttaacaaactggatttagttggaatcgttcggggcttcttgtgatatgccggtttgtttgagtggagtatctgtgattaactttgttgtctgattggtcgaccgtctagctctctctggcgagcgatcattggaggcgatcatcctccatgagaacgggcatggcgacagggacgaaagcaaaaaaaataaattggccaagccaagggacccatcgagtgggtatatctgattggatcggatctatctcgcttatttatagaacaatttgtacctgaccctatcggccttcgtcgcccgttgtggggcggcgggcctggtcggtcaatgggataaatgggcggtatggataggtaccccgcccacgagagaagcgcagtcgctctgttcctgattccttctaatcagacaagaaaccaggtacccagacccacaccaatcaggcacccgacagcggccaacatcaaatccggacggaacgataaaaaacacaaatttacttcctctgtctgtttctttcttcctttcgagattcgtttaaaacagagagccgtccgattttggtctgctttcctttctcttctttcccttgacatcaaacacacactctctttatccaccctactcgctctccaccaacgtacgttcgtctgtcgacctcatggtgccggcgatgttctgtgaagaagagaatcaaaactgacggccttcgactttctcttcacgattctccttgtactctctcttttctgatcctccaatcacagatgcgaacgagttttatggccgctgctgctgtcgcagcaatgaccactgtccaggcagcgttgatcgagcactggtggtaagtcctctttcttctgtggcaacgtcttgcctgttcacttccagcctaatgttcgactcctgcctttcttttcctattacagggacatcacctatgctgaagccaatcctgatcgtgagcatgacctcctaggattatcaattctatcttttatttttccttcttttatttttttaaccttacactaaaccgacatttcttcttcactcagaaatgtatgagcgacgagtcatcggtgtcaatggaacttggtcagtgattacccactgaatgaccttatcccactagacaccttgtgacaggctcgatcttacttattttttttatccctataggcctcctcccccggttgttgccactcgaggtgatatcgtccgaatccacgctaccaacaagatcagccaacctgccgctcttcatgcccacggtatgttcttcaacagaacaggttactatgatggacctgttggagttacccagtggtatgtgtagcctccctgtaatcttgtcgatcgcctcacacgcttatctcctttcctcttcttagcggtatccctgtcgacgcgtcccttacctacgatatcgacacccaatatcagcaagggacgtactggattcacggacacaacctcggtcaatacaccgatggtctccgaactcctttcatcatccacccaaacaaagaaaccactagaaccgacatcacctgggatcatgatttcaccgccgttgtgtccgagtggtaccatgaggagcacgaacagcttttgaccgagtttatgagcattgtgagtttctgtcctgtattttttcctaacttgatgtatacatatcctaatcattgtcttttacagtacaaccctactggagccgagcctgttcctccctcggccttgatttactttgcggagaactttgcgaattacagtgactatgttggtggcgctgccgccattagcaacggctctataaccgccgacaggtccatgatcaacttcgaggctggcaagaagtaccttatccgattcatcaacatgggtgctttcgccatgttccaactcgccctagacggtcacgagtggttagtctaaaaactgctctttggattggtacaacgaaagctgatctcgatccgtgaccacttcacaggcaaattgtcgaggtagacggagttgagactaacccctacacgatcgaccacttccctatctctgttgctcagcgatacgccgtcctcgttactgccaagaacgacacgagcgagaacttccacctccatgccaactttgatccccagatgtttgatactgtgcccgacgatctccagctcagtcagtactcttcctgccttatctatcatttgttctcttgcgcacagtcattaaccttgccatgtcttctcagattacactgccactatcaactacaaaactggtaattccgtcgccgagggtagcactattgaggcttacgacttcttcgatgataccgttatgtcgcctcacaagcctgttgccatggctgaagccgactactccttcgcactctcctttgccttcgacacattcgacaacggaatcaaccgagctgccttcaacgagactacgtacaacgcgccttctaccccgtccttgttcactgcggcgtcgatgggtgcgaaagcgactgtcgaggcttacggagcgatgaccaatgcccatatcttccagcgaaaccagatgattcagctcaccatcatcaacactgatagtggacagcaccctttccatttgcacggacacaacttccaggtcgttcaccgatcgttcaacgactcgtctcccgccttggttgagggacagcccaacccgttcgtccgagacgtcgttatggttcccccggatggtggatccaccacgattcgattccgagctgataaccccggagtttggttcttccattgccacattgactggcatttgtcgtccggtcttgccgccgtgttcatcaccgctcccgaggtcatccaatcgactttcacgatccctcaggagatgaaggatcactgcgcagctctcggtatccatgccgatggtaacgtcgtcggtacgtactccaccaccgactttactggtgagcccctcggaccgtacccgattgtggctggatggaccaccaaggctcgaggagccatggctggttgcgtcctcgccgctgttctcggtatggccagtgtggtctggtactcgtggggctccctcgacgaggctgaaatagaggccgaggagcagaggagacacgatcagaagatgctcgacaaggccgagggtcgaaagcacggtgtgcttggtctcgccaacaagcttgccggaaggcagtgagcgtcttgttttctttcttcatctagcttacggtcctcatcattcttctatgtaccataccacacgtcatctgcatggagtctaatctcccgatcgactcgatccttctctatttatcttcctgatctattaaagaagaaatcttatgtatcaatctcaacctacgaattaaaataagatcgctcgatccatatgatcgttctttcgtcctggcttcttttcgttatcaccctttcctttttcctttttcctttttcctttttccttcgttatcttttctggggttcttcgtattttctacttcctcgctttacaaatatatatagatctggtgaagggatattgctgtcgttctaaatcgtaatgacgacttcccaacaaaaacaaaaactcttgacattgaagtgaatatgaagaaaacgttgactgcaagcctaaagtgattacaagtctaaattgcggggtctgaagctcattcagtggtatatgcttatgagacgctaaccctaacaagtgaaaagaaatagaaagaaggagaaaaacctcatgactacacactttgacaacggtaatgtctctatcctttttgtattcgtgtatagtcgtacttcgaatatccttcgactcgaacttgtagagacgaaggaaaagaagaaaaggggaagacagatatcatggcaaagggtatgcagattacaacaggaatcgccatcaaaattgagaggaaacaagaaatgtcaaaaagaagagaggaaatcaatcacgaggaaagagccgtcgtcgtcatcggcagcaatgctactggtggtggtggtggtgatgatgatgatgatgatgacgataatttctgctttgattccaagagggcaagacttccgacgaggatctcccatgctatatctagaacgcgtgaggttcaaaaatacgaatagaaatagaaacaaaaaaacaaagaggaaacagaggaggaaatccgtgattcagtcagcatttgtacagtaagagaaagatggatggcgttttcaaacttagcaaagaaagacgttggaccaacccatagttcgccagagagccgaatcagcgattcccaaagcgcacatgttctcccatgtgccatgaatgaccgcaatcctgtccatcagatcgttcttccctaatcgattggccatatcattcatcaatcctgttctgcccgacggccgagttggttctaggacattcaataacttttcgagcaagtcgtccggcctttgagtgtacagaaaattattgatgagaggaaattggttcggtgagggtagtgcgatgctgacgacaggaagttgatcgactggaagatactcgaatgacggaaaagggggtacatgagcgcaagaagcttggtaaatgatagcgtggactgggagcaacgtgcctgttggcgttgcgagatcgttggaagggatggcagtcggccggatggcgagcatatgagtgggaaggacgtcagaggtaacgtttggagggatgtcgaatgtcatgatcgacggaagaggtgattgaacgatacgtcggtccgatagcgagcaagacagagcggtccggagaagttctggacctcgttcagacagtttttccaacagataatctagtggctacgaattctcaagccaatacaagacaccacagttcaaccgatctgaatcaggactgctcgcaagttcaaacacggtcttatgactaaccacttctggatccaagcctttgatggctccgatgtcgatgtttgccggtctgtctggcctcgggagatacaatggcaagaatccgccgcccggatgaggtagggttgaatcattgaggctattgacctgcctggtagtcgagtgacgagcggaagcctctgagacttttgatcgtttgggcgatggggttcggtttgatcgtcgcagctcgttctttgacgatgatatagaggtcggggtgagaatcgcctggcgggcggacgagccggacattctcgaacgaggacgcatcttggacgaacgactcgacgacggctgtcgtgatggagaagcgggcgaggatagggttatcggagttcgaggaagcatggacatcatcgtgactgacgtcaggcacagggatgtatgcggaggtaaaaagcggtgagggcaagggcaagagcgagagtgaatacaagtgacagtccgtgccaagacaagacgggagaaagacagtacgtacgttgtccaaaggaaaggcagagaagaaggtcagaaaaggtcaggtcggaagtgagtctgtgtatatacggggagagaagggaagagaatggagaaagaaacggatcaagggaggaaaaggaagaggacgaaagaaacaagaaaataaataaagaactgtctggcctttttatggcatgtagattttcttcctgtctgtcagatatttggccgacgtctgtcaagcacacctgtcggtacgtcagtcggccagtcaatcatctcgtcggtcagacagccggtcagccgg

SEQ ID NO: 3206 - DNA, 4457 bp, Xanthophyllomyces dendrorhous
tcattatcgttctcttctgtctccttcttaggaattcttgtaaattacaaaggcatcagaagaaacaatcaacggagctttattactatcccccttctctttaggcgtttcaaacacatactcaatctgtcggatcaggttataaaaagcaaacgtggcatcacttcctcaaagctcatcgctctacttgcatgagtctgatgatcgttagctctgactcgaggggtagcagttttcaattgagaaaagagagtaacagacctaggcaagtttgctcctgcgtcgtttaaatataatttctatcaatcttccataattttcacttaagtgtaatcatccttaatcaattacactgtcataaaattcacttgaaagtcgaagcattacgggatatttaagcaagtttaagatgccatcccctcgacagactgaatccaaaaagtggaaagcaatctatcgacacagatgggaagaaggtagaggaggtccctgacaacacaagccggcagtgcagtggcaaggtcatcgtgtccggccgtcgtgcaagcagaggatggccggacgggcaaggcaaaaagaagtaaaccagatgggtccggtggacccatataagtggttaaacttataagaacagatactacacatgatctaagccaaaaggccagagaggatgggggaaaagcaaataggctcaagaccggacgaggggccataatttatacttttccgacttgccatctttctctgaatttttccttcttgatcttctttaattgtcacgcttgtcacgctgaccatatggttttgcgatcagccgcgtagttctttagttttctcttcttgtgagatctgctgttcatgttcaatttcaaataacacgagttccgtccccttgtttgagagatcaaccagaagattcttcccggtatattacttctaaacaaaccgatattaatatgaagatgattatgtttgtcgctactagtttcaccacgagactcacacatatatacacacaacgagccttcttctttctccttctctgctgtggtcaagtgatgagaatcattcatgtcgagctcgcacatccgacggtccccaagatgagagtgagacaacgagtgacgaccgggcaaacaccatgtttcgactgtctgaacccggacccaacaccgctctgaagatgattgtctcattttgattttgattgaaacacagacatgaataagatttgagatattctctcttcaaataaattcatctccctccttggcgaacacgcatatcgcccaaagtctttgctccctatcatgcacccttccccaaagccttgccgggtttggcgaaaagtcaaaggacatagcttatcgctcagaaggctttgatccgcctttcgttaggatgttttttcggaagagctaaagaagtcaaccagaagagatcaagatttcacaccccatcgaatgtttacaacccacacttcgctctctttgttcttttcttcctcctccttctctcgatgaaacaagcataaaagaatgtaacaagaggaaggggaaggaagaaagggggggagaagaaagaagcggaaggttgctgagtcaagaagtaagaacaaaaagggggggtcggttcgaccggggggtttgacaatcaataggttgagagcttgtcggccaaggcaaataaaaggaatgtttctaaatcaaagttattccgtcgggctcatcggcacagttctttcgtccgctggtttcatttgaacctcacgattgactgcgcggatgtgtattatacgctttctatattcccatctacctcgtcactgatttagggttatacagcaatacccccgccacgtcccgtaaattcacaaagtcagctaacgaacaacagagctacagtggatgatggattcatacgtaaatgaacagatgcgaattttgcccgaagggatatacgcacgcacatacacaccatgaatttagggaacagagtaagagatcgggccgagtaagcgcacggtttcggtgaaccctactattcatgcgccgagcttggtattgcaggccgagctcgggccaagccgttcggctgagctgtcgaagtttttgtcattaggttttttggacttgtgctgtagctgaccatttaaatcaattcgaacaaacgaaaaaaaactcaagatatcgccaacttcggggattcttctttttaagataaaatagaatgatccatggaaatagaccataattacacgaactgtggtgatgttcgtgaagtcaagatgcgtgaacccgaagactgaggccgtgaatgtagatgtgagtttgagtgaacgtttggacagatgactgtgccaaacgggcacaggccgggatggtcctggactgtgagtgagtgagctgtgagtaaaataagattgatcgagaggattcgagcccgaaagaagcatgcaaagtgattttcattaatgccggctgagtgagcaggctagatagatgactcagaaggctacatgggcatatcacacacggccgccaaaactcacgccttcatacgctcatgcttatcctcatggccgcatctacagtcatattgatatcctcatcctcacgcgggcacacacacacacacacacacacacccgcgggtgtgtgtgtgtgaaagccaaataagaataggggtctatattacatgaccgaccgtgtcaaacaaacacgcagccaagaaggcttgtcccggagttcaatatacggaaaaaggggccgagaaaataatttgactgggtccaagcgtatcctcggcaacacggccaccggccagctctccatccccgccgttcgccgtctcggctgacaaactcagctctgtggaagatatccgaacgttttcacttataaagaagcccagctcgaggtatgcctttcttttgatcttcgtttagctctcccatcactcgattgaatctctagacgtattttcccatcacaaagacaactacttctacttagagctacatatccacattcaaaagatgcctcttatcactagaaagaacacacctccttccttcgtgatcggtcaatcagcttcgttcactcagccaactcaacaaatgagttcccctccagtcatcatcttgactcgttagttcgaaattccttctctttcttccatgcgcctgtgagactttgctgatattccatcatgctttctttccaatcagctcctccctcagacatgccaactcctcccgctgacacccagctctcacccactgggccttccctcgtcagacgagtcagcggagcaagttcatcagcttcgtcaaagtcgtacgatgtgtcctacttcctgccttcccgtcggtcccgacgaccttcgagcccgcctggaccaatcccggttagacttcgaaattcaaagctaattctggaccagaacagtccgtttcgggcgagagcactaggattagatctcgtcgttccttgaattcagtctgaggatcttgccaccaattctccaaaggaatcttcctctcataccatgtctttccaaatactcgtccgaccgagcacgtgtgtctaaatccaatcggaccgtctcggacgtgtatactctacggaaacactcctgatggagtttccctcgtaggaaacaatgtcgtctctcttttatcagtgactatatgctctccgaccggctggttctttttcggatctagagcttatctctgatcctatctggccatgcgtctttctctactgccatgcgtgcttcgctcatggcttgtatatttgtctcttggtagtgtcctcagtctggtgtccagttggaatcaccatctgatttcttactctcacactcagtatatagtttttacgttcctcttacaactcgcatcgatctagatactcgattatcaatgcacatcctctgtttatttctgcctgctttttctttctatattcctcgagacaaaaccgagaattatcaggaagttccgacgacgtcgagatgagatgactcgctgagagttatcggcatcgagtcatatacttgattgagatttttgaattgataacattatttatatgtccaacagtgtagtcatcctcggctgggtggagcccacggtaaaagaggaagagaaaaaaaagaccgccttagcttctttcaacccatctatcatcccgtttctcttcatcctcatccagacatggctcagttaatcagagatacattcgcaaactccaaggctgccggcaagcctgtgtttgtgtccttccttaccgcaggttacccaaacgccagctcgaccgtccctctcatgctcgccctccagaagggtggggctgatatcatcgagctcggtgtgcccttcagtgatccgatcgccgatggaccagccattcaacattccaacaatgcaagttttttcttttttttttttt

SEQ ID NO: 3207 - DNA, 6873 bp, Xanthophyllomyces dendrorhous
ctacagaacgacattgacttcaagacatgccttgagcagatcaaagaagcacgagctgtcggtttgaccactcccgtcttgcttatgggttagtactttcttacagacgttcccctctttctgtaagtttgctgatcggctgcttcgtccgatttttactcttgcaggttactacaacccagtcatgtcctacggagaggagaaggcagtcaaggacgccaaagacgctggagcaaacggattcattatggttgatcttcctcctgaggaggccatccgattcagaaccacctgcactagcgaagggtaggttttcacgttttaccttgtcttctttctgatacatgtcgctcacatattcattttcctcgtcatggtccgcaatagactctcctacatccctctcatcgctccttccaccactgatgctcgaatcaaattcttagctggaatcaccgactctttcatctatgtcgtctcccgagtaaggcactgtttaactcatatgccctttctcgttggacaaagtctgacagttcaactctttgttcgtaacagatgggtaccactgggtcttccgctgcagagtccatttccgactcccttcccaaggagatcgctcggataagaaagttcacccaagctcccttggccgtcggattcggtgtcgccactagggagcatttccagactgtcgccaatgctggatccgacggtgtcgtcatcggttctcgaatcgttaacgtcatcaaagagactgctagcgatgacaccgctcgggccgagcgtctggaagagtacatccgagaagtttgctcgtctgagccttccgacaagccttcttcgtccaagcccccgccgacagccgagccagagattgcttctctccctgcaaagccggccgacattccggaccaaaaggtcgccaacggagatgcgcttcctgcgcgattcggaaactttggtggtcagtacgttcccgaggccttggtcgagtcgcttaacgagctcgagcaggcccacaaggacgcgctcgcggatccgtcgttctgggaggagttcagagggctctacggctacatgaacaggccttcagaattatacgaggccactcgattgaccgagcatgccggaggagcgaagatctggttgaagcgagaggatctcaaccacaccggttcccacaagatcaacaacgctgtcggccagatccttctcgccaagcggctcggaaagacttgcatcatcgcagagaccggagccggtcagcacggcgtggccaccgcgaccgcctgtgccaggttcggaatgaagtgcaagatctacatgggagcagaggacgtccgaagacaggcgctcaatgtgttcagaatcaagatgcttggaggagaggtcgtccctgtcacctctggttcgatgacccttaaggatgccatcaacgaggccatgcgatcctgggtgaccgacctatcaaccactcactactgtgtcggctctgccatcggccctcatccgttccctacgatcgtccgagatttccaaaagatcattggtcaggagatcaaggagcagcttcagaaagtccgaggaaagctcccagacgccgtggtggcctgtgtcggtggaggaagtaacgcgatcggaactttcttcgattttattccggacaagaccgttcgattggtcggtgtcgaggccggtggacatggtgtcgacagtgacaagcactcggccacgctctcattgggtgtacccggtgtgttgcacggagtgagaacctacctcttgcagtccaagactggtcagatcatcgagactcactcgatctcgcccggattggactaccctggagtcggtccggaacactcttggttgaaggataccggtcgggcagagtacgttgtggctgatgatgagcaggcccttcgagctttcaggctgttgacccagttggagggtatcattcctggtaagtcttcgcgcttcctttcctttcatgtgggttctgtctagaacttcgtctgatctgtctcggtgtgttctcttctgcccagccctcgagtcggcccacgccatccatggagctatcactcttgccaagacgttaccgaaggaccaggatattgtcgtctgcctgtctggccgaggagacaaggacgtcgacgaggtcttccgaattcttcccgactgggctgatcgacttgactggaagatctaaggcggagggatgaaggaagtaattggagggaatgaggaaaaaaaaaggcgagggaacgcggtcttctttcctggcaaggcaatgtcgtgtatctctcttgattctttcgttgtatcgacggaccacactcttttcgaatgaatatcactatcgcatccaatgatcgctatacatggcatttacatatgccagacatcgctgagaaagagagaacattcctttggaaaaagcctactgtgcctgaagtcaggctgatgttgattaaacgtctttccccatcctaagcagacaaacaacttcttttcgttcaacacaccacctctctccgaaaaagctcttcaatccagtccattaagatggttcatatcgctactgcctcggctcccgttaacattgcgtgtatcaaggtccgtctgcattgtgaatgctgctcgtttgccttgtgtgcgtttggtggatctgaaagaacccttgcttgaaccattccatctctgctctttttcttcctgtcctttcctttttctcacgacaaaaaaaccacctggaccctttgtgttcctttccattggtgttcatacacctaacacagtactggggtaaacgggataccaagttgattctccctacaaactcctccttgtctgtcactctcgaccaggatcacctccgatcgacgacgtcttctgcttgtgacgcctcgttcgagaaggatcgactttggcttaacgggatcgaggaggaggtcaaggctggtggtcggttggatgtctgcatcaaggagatgaagaagcttcgagcgcaagaggaagagaaggatgccggtctggagaaagtgagtttttctcctgtgtgcgtgtgtactctgtataggtaccgttgacaggacagtctttctgaagagtttggatcttactcttttttgggggggtggtggtgtttgaaataatgaccaaaataaagctctcatctttcaacgtgcaccttgcgtcttacaacaacttcccgactgccgctggacttgcttcctccgcttccggtctagctgcgttggtcgcctcgctcgcctcgctctacaacctcccaacgaacgcatccgaactctcgctcatcgcccgacaaggttctggttctgcctgccgatcgctcttcggcgggttcgttgcttgggaacagggcaagctttcctctggaaccgactcgttcgctgttcaggtcgagcccagggaacactggccctcactccacgcgctgatctgtgtagtttccgacgagaaaaagacgacggcctcgacggcaggcatgcaaaccacggtgaacacctcgcctttgctccaacaccgaatcgaacacgtcgttccagcccggatggaggccatcacccaggcgatccgggccaaggatttcgactcgttcgcaaagatcaccatgaaggactccaaccagttccacgccgtctgcctcgattcggaacccccgatcttttacttgaacgatgtctcccgatcgatcatccatctcgtcaccgagctcaacagagtgtccgtccaggccggcggtcccgtccttgccgcctacacgttcgacgccgggccgaacgcggtgatctacgccgaggaatcgtccatgccggagatcatcaggttaatcgagcggtacttcccgttgggaacggctttcgagaacccgttcggggttaacaccgaaggcggtgatgccctgagggaaggctttaaccagaacgtcgccccggtgttcaggaagggaagcgtcgcccggttgattcacacccggatcggtgatggacccaggacgtatggcgaggaggagagcctgatcggcgaagacggtctgccaaaggtcgtcaaggcttagactataggttgtttcttctaaatttgagccttcctcccgcctcccttccacaagcataaaacaaaggataaacaaatgaattatcaaaataaaataaaaagtctgccttctttgttttggaatacatcttctttggacatgacccttctccttcttttccgtatacatctttttgggtatttcatggtgatcaaacaacattgtgatcgaaagcagagacggccatggtgctggctttgagcgtctggcgttttgtgtgtcctgcacttgagcaaccccaagctgaccgctaggaaaactcattgatgtgatttatatcgtacgatgaaagagaataaaatgatagaagaacaaagaagaacaaagtagaagaacgtctgagaagaaagacaggaaaatgacacgtacatagtgttcgatgatgaatgatataatattaaatataaaatgaggtaaacgtatagcatcacgggatgaacggatgaacatgtagtggacaaggttgggaaataggaatgtagaatccaagaatcgttgactgatggacggacgtatgtaaacaggtacaccccaaagaaaagaaagaaagaaagaaagaaaacacaaagccaaggaagtaaagcagatggtcttctaagaatacggcttcaaaaagacagtgaacactcgtcgtcgaggaatgacaagaaaagtgagagactacgaaaggaagaaaccaagacgaaaagaagaacggagatcgaacggacagaaataaaggcatgatttcgtttcttcttcttcttgttctacccttgaacacctctaccaaactcttcacttattctctttgattctgagcctgatcctgagcttgaggtcaagttggtcgagccccttagcttgaaaccaggtgaggccgcgccgagtcctatcgaaaacacagcgtgtggtgcaaagtcaactggcataccatcttccggatgtgaatgatgagtgttgtgttgggaatttgattgtgaatgggagtgatggtggtgaagatgagggctgagagggaagtgagacgaaggtatatacctcctcggtgagttgacagatgatcgtctagatgtggctgtcgagggtgagagtggggaggggaaggaggtcgggatcgcgtcagtggacgatcgacgggacggatggatgagcgagagtgtcggcttcggcctcgattttttgtcggtttcaccagaagaggacggagagagagtagcgttgtcgacatgttctggggatacgttgacgttgaggcctaggccaagcccagatccttgcgtcctggcaccagcttgagaaatcgaagcttcttcttcttctccctcctcttcgaccttccacgggttatgataatcgatcttgttcaacaaccttctcctttgctcttcgggatcgttagtttcgtcctcatcgtctcgatatccggtttcgtcgatctcagattcagcctcctcaacccaaacaccgacgtcgacgccacctgcacctttctcgcctgtcagactgacaacgccgacacccgcgagcaacacggctacaccgacgcaaacgagcgcgacgctcaaatccgtaagcacgttgagttggttgaaatagacgagtcctccaaacacactggacacgttgtagaacgaaaaggcgaccgggcagacggcagttggagaggcgagcctgagcgctttgttcagatagatgagttgcgcgagtgcgagtatgaccagggagacaaccaagtacacggtcgtcagcgagttgaattggttggacgacggatgggagattgtgatgagaagaagttcgattgctgattttgcgatcagaagacataacccggacagagttcccgatatcgcagcgtaggaaagtgaaagaagcaactgggtccgacgctcaggcgacgagcaggcgttaggggcgcatgggctttcggaggacgttccgtcatcggagcatggcttggatggcgaagccgtggacgggaggggtcgtgtcgggccgagggaaggggaaacgggtagttggattgggccgggctggctatcgattcgtttccacataaagtgttcgaggatatgactctgtcagagggagacggttgaagagctggttcaataagagacagtccacagggaatgggagaagacagaaaacgggaacaaacggtaacaagagcgaggacaacggcggcggcaaggatactgatgtacgtcgtccactgcggtcgtccaaacagacgaacgaggtcgtcgatcgtatggctgggttcgggaacgaccccgaatgtggcaatcaggattgcgccggtggtgatgaggatggtccctggaggcagggaaggcgaagagcaaaaaaggaaacatgatcagacactccagctgcttccacatatgaactgaaccaggctgaacgtaccgaggatcatgaatctggtgaacgagtcaccgaggaggaacctggcgaagagagcgttccaaaggagggagattgctccgagcggtgcgagaacgacgataggaagcgctccgacctggaagattgtaccgagaacattggatgtgataaagatggcgaacccgatgagccagagcggacgtttccactcgaccttccggttgtcgggatgggcctgctggttgatggtgtgggacttgcgctgtatggtcagtccgagcgactgaacgaatgatgagacgaggccgatggatatcccgacccagagagatatcggtccgtctgttgctgtttggtctgacggtggttct

SEQ ID NO: 3208 - DNA, 6796 bp, Xanthophyllomyces dendrorhous
tgtgtgtgtgtgtgtgtgtgtgcacaccatgtcggatctatcaagccaacatgctaagccatgctaccaaccaacacccgcagatcgttgcccacaagcgacagacacatcgtcaggatgaatggcaagggaacagagagcacagagcacagatgactgatcaatctgagagacaacacacacacacacacacacacacacacacacacacatacatgctacgacagaacatcatagagatcccatgaacccagcaacctcgtgagagcaacgctggctcgtcaacttgacggtcaatttttctgggcaccatgtttcttccatcttggcacgtctcttgctttgtgtcgactaccactcgctccagagttgccaacaagacaaacagaacatacacatcgtctacgagagccacgtctcggtcggcaaccacactgagtacacagctacaagcgcttcttgtcgacagtcaagctttttgggagatatacactcggaaaggcttcaagtacatcattcgttgccgtgtttgtgtacatcttgtgtctgttgtagcacccgttctgatcatctcttgtttgtcccaacaggtcaggtcgttctagtctcctctcgtcagcggaacaaacagttgaagacagatctccctggcttgtctttttgtcttggaagcaatgtcctcggccatctcgaagcatggtgtctctgggatcgtcaagattgagcctgaagatgatgagatcatctttctgtctgaacctccgccaccccagaagaagcagcctgtagaaccttttagggaccagactgctactgctactgctgctcctgctgctgctgctccggtctctgcatcagtcgtcactaaccctcctagtgctcctgcttcatctcggacagcgtctggttcatcgtccgacgcttccttaccagcaaccaaccctcgtctcccaggtcgacaggccacccggtctaacggtccgcctccgcctcttccttctttccaacgtcgtatcggtgcatcagccgtatccagactcaattcgaccaggcctgacgcctcggctgtatcagcaacaggcaatccttcaatcgtaaactcttttacagatacggcacctcggacaaggcctgtgagcctgctctcacggatcgagccttctgcaaccttgcccatcgtccccgtccccgtccctgtcccggcacctgtcgctctgagacccactccagttgtctcaaccgtttcatccgcgccaacaactaagaagcctcctcagaggcccttgtcgcctaattcacggccaacagaccccagacgagccgtacgggccaggcaactggccaaccaggcttctgtcgcgccatcttctcaacagatacctgcctttgcctctggccctgcacctgcacctggctctgtacctgcccctaccgctgccgctgttgttgtccctacctctaccgccccccctcctatcgcaccgcctatccaatcggcaccaccggtctcccaaccagcgcctcttccgcttcctcaagcgaccgcatcctcaaaatccaatgccaatcgacccaatcctcagcccaaacccaagcccaaacctaagcccaagactacagctaaagccgtccccctctcgccaacctctcatgcgccttcctccagcaggcattccaagtctcctcatccctcaccacctatgcccgctcccactcatcccgtcgatatgtctgtctttcccaattctgatatgacgtcctatcttcctgcattccctactactccgttcgatagttacccgtacctaggcttttctccagccaaccaggctatcggcaaccattcgggatcgatcgcgtcgtatgactattataacactcatccttatagtgcacctgttcctcaatactttgctccaccgtacatgctagatcccaacttcactcctgtctctcaacagcagtttggccacccctccttccaatcctctcttccctcttgccaatctgtctacccttcatatcccgtcgacccaatcccccagcatacttttcctggtcacgttaatccccctggacccagctcagcgccggaccagaccaagtcgacagcatcacgaaagagctcccagtcgaaagagccgcccttaccgagcgcatccgttttactctctcactcatccgtacctggctcatcacatccatctcgctctgttcaacaaccgcccgtgacgctcgcgcaaccgtcggcaaaggacacgcaacaaccttctgcacaagtatctctggttcagatgaccgatccggctcgccgagagaggactcttcccatcctgtcggaaccaacacaaatcgctgcgtcgaacaaaccgccccatatcccgaacgcgaagtctgctgatgctgttgtaaagggagtgagcgctggaacggctcatgtcaaagatcgacagtcgaatgagtatcgtgtgaacatgagaactgaacctaaacattctgctgttccaaccaatccacaggctgtttcaggaaccaagccaaacgaatcatcccaggttgtccttccatccgatttggattctcgtagtcctgatgactctgcaacaaccgagggccgtcctatggctgtcgatgtacccatcggcgcgtcgcagaaaaagcccaatgtgaaagagctaaagcctgatctgaagcctgacttcaagcttgacttcaagtctgaattcaagcccgattcgaagcctgaattgaagcccaagctggagccgagcatcaaaccggacgtgaaatcactgttgaagacagaaggacattctcaacccgaagttaagaacagaaagacgcttcaagaaagactggccggggagaaaaagctggccgaagccaacagatcgaaatcagctctttcttttccaccttctgcctcacaatcacgttccgatgaatcgtccagtagacctttggacaagcccactgaaaagtctcgtgcaatcacttcaaatgctgctaccatccccccatctccactctttgccacgtcgtcgtcgtcggcggcggtttcagctccaagctctcttcacgcagctcatgcagatccttctcagcactcgaggtctgattatcgagaacgatctcctcttccccctccttctgtccctcctcctccttctgtcccttcccctccgcctcctcgcagagagatgcggccctaccatgattactacccgtctccatctccgccgcgaagacgcgaatatcgtcgaggttggctacctgactctcctcctcataggcgtcgtgaatccacaatagacagaggaagagaccgatcaagatcacctatgtacgatcggtacgagccgagatctcgggtttatcgacgatcaccatcatactcaccatcgccatcgccgccaccaccaccaccaccgtcgaggatgagaagagatctatctccccttcgcgattccgcttggacttcgacgcggcgatcacgttctcctgtgacatacacaaggcgatcccccccgcgttggtctctggttaatcgagtcgacccgattaaccgagttgaaacgcgcatggtatccccaccacgcagccgcgtgcgcgatgacagctcacgcgttgacatgggcgtcagaacggcgacatcccaaaccagttctgattctagatcgtctcagatcccatcgtcgttccgaaatgagaatcttgataggtctttagaattcgacgagcgatcgagagcaaaagaggtaggccgggattgggagtttggtaggcggcgggagattgaacgagaacgagcacgggtggcggcaatagagaagcgagagcaaagagcgcaagaatgggcagcagaacagcggcagcaccgacagctgaggcgagagcgagaggaagcgcgagaacgatccgaagcgattgagctgaggagaaagaagaaccaaacgcaacaggcagcgtcgtcatcatcggccagctatccaaccgatcctgattccatcgggcgaaaggtcagtttgcatcaaactgacaaaccttgtccccggctttccgtagcgaacgcaacgttctgtccacctgcaatggggacgaaagagcttcccgaattgcctattgccatcaggccggtggaaagcacgtctcgggagtcaaacgaagctttagcggccccatcccgaccacgaccatcagaagaaaaagccgagcaaggggatctcgaccttgcgcgcgtcgatccggttgacaccgcctcgctgccgaactcactctcgcagcagcgcgagctttcgggtgactctacaatcgacgttcctcctatacctcggatctcacccgtgagagattgcccgccgccttcggattatcaacctgaagtagatgaggttgagtttttgttggacgaaaccgacgcatggcccgttcatcctcctgttttcaacgatcggaatgaggatgaagaggtatatcagccagacgtagtgccaacaaactccttcgtaccaccagctttgccttctcctgttcgaccttccagccgatcttcctcggaaggcctgttgatcgattccctttactccgccactggtgagcctatcgcgaactttctgcccgaattatcttcttccccccctcccgggaagaagaagaataggaagaagaagaaatccggacccaaggctagcaacaagtaccgaatcggcaacgacaatcttgttggcaacaactccattaacaacagcaacaaaaccaagagcgaccaagtcaaccagatctacaacaagaacaataacaacaacaacttaggtgaaaagagactgagttcaaatatcgcggtgacggatcttgctttacctgcaagatcttcgaacactacgttcattgcgcctctgccaaacacctcgactagttccacaccgcctcgagtgaacactttagcagtgacttcttttgttaatgacgaaacgcccacgtcctcgcccagagtcaaccctctgcttgtccgtctgatgtcaaccgaaccagcgccccctcaacgacggtcgcttttagatcgcgcaggggtttcatcaactcgagacataaacgagggagcagacgggtgggcctcaccaagctcattaatcggccggttgtggaacaggggatcaagatgagaaaccatggtgatgaaaccgtgagtgcttctattgtagagttacttcgatttgctttgctgacgcttcctcttcctcatcctatttcgtatttgcttgactagtgatgtacatgaataaaccgtatttttttattctctgatctctttctttttccttactccttttgtgctatttgctctgctttctctctccgcgcatgtcaatgtttctcaactatccgtttgatgagcctcgggcatctatatatcacactatgctctttcgactgttcattcaatgtcgattcttatgtttagatcatccgtgcccgccttcctaagcttgatgaaaggaagatgagagaagcagttggtaatctcagagatatctgctagaaggatatgtcgatcaccgccgcggaatgaatattgataagatcgtgttttcctattcgcgttcatttaccatcatcaccacaaggtgcacccggcttctgcagcctttttgtcatcgctcccgccatgtccagtctatctgcagctcgttccaggcagtctcggatagactcatcgaaaagcgaggccaaagcttatgtatcactcttccgagcgtttagctctcagattcaaccacccatccgacagatcttggacctgaaggatgcgaaaccgtttggagactttctaacaatcctgtgaggcttgatccttgattcagaccacgacctgtagccttttacttgtggagtttgaagctgacgtgtcccttcttcctatggtatgttcaacgccttgcttgaatggtcatctatagagctcccgaaagcttctctgagcagtcggtgaagatcgcccctcggtcttcaccaagggatagctcggcgaacgactgggtgacccaatacaatagtctgaaaagacttcatcgggctctcaatatatttgctgagaaaagtttgggccagcctccaaatcagtacccggctccgaatttacaggctatgtctaaaggggacgagaaggaaatcctggccttttgtaggattgtagtaggcatcaggttcgtacatgaccctgagttttctccgtttttgtacgtgccatcttgcttacttttgaacccaactatgatgcttcgttccggtctgtctaagcgttcaagctactccggggaacgaggtgattatttcaaagataacaactttagagcaagccgatcaacagtccatcatgttgtccatcaaaccggtaagctttctttgcctatctgtgacagtttctcttggtgtctttcgtgttgacttattcctcgtttatatacaatggcgtctctattcgaagcttctcgatcgggctaatccatcagaaacgcctacgttgtcttcatctctaccgagcgcttcaaacgaagccgaagaatcaccacacgaatctgaacgggcccggttggctctcgaaaagctgtctcttgaaagctcttataacacattgaaggaggagcataacacgttgaaggaacaattggccgatgtgctcaaaaagaatgggaaggaaggttcaatggccgctgatagtaatcgggaggattcgaatatgaggtcggagatcgataggttgaaagacgaattgtatgtctttgttctcctttctatc

SEQ ID NO: 3209 - DNA, 8454 bp, Xanthophyllomyces dendrorhous
ggagacgttaagttgcggacctaacgtcttcttctgaattcgatatatcatccgagtatctagacgtagaagtgaggataatctgagcgatgcggaactagcactcgataaacagacacaagtcatcgagagcttaacgagacgggtaagctttgagacttatcattagttcggtcccacagtgatgcattatccatgctgaaatacatcattctctatttaaacaggtcgaggaattgaatcacgcgtcaacagagaatgtcaagttgaaagatcagctcgatgagtgaggtcctggtacatcgagtcgcccatccgtgactatctcgctgatcggttatcatcgttcttgtctgatcaggtacaagcatgcagccaataggctacagaagagtgagaacgctaacaagaagctcaatcaaaagttggaagagtcggccgggcggagacgccagctcaaagtgcgcatatttcgatcattcttcctttctctctctccttttccctgatacacccaactgactctgatggtctatccattacaatcgtccaataggcgttagaagaagagaacgcttcgctagtagacaaaaacgcagcgttagaagaagatatccggaaggttagttcatgaatagtctcttttcatgaatcatgcgcacagatctgattgtatggccaactcgtcaatttggaacaggcagcaccacttaaacgtatgaggttcatgtacattcaaaacacaaagtcgaagtgatcactgactcatcatctagaacatcaggcttgaacgagagttatacaattcaaatcgctcgatgtgaagatcgagaaaaggctcgactaaaggaaaattcaggtgcgcttggcttttggcttggtcaccgccttaaaactcggtccctgaccgtttgtgttgattaccacagagctttccttcgaactcgaacaagcacgggcccgcttgcagaaggcagagcaagacttgacatctagtcgggatgaactcgaactcaaccacgaacgcatcagggagctagagctcaacagtgctgatggaaggtctcgacgtcgatctgaatctgatgaggacgaagacggggcaggagatgtgtcgatgatagacgagctgaatgagacaatgcagggtaccacgaaaactgagtaagcttcttcagattctcgtcttgtcctaatcttcaacttcggagtggcctgttgacatccagagagtttggactcaaaaacggtgttcagtctcaaacttcaagttcgtcgcctgcaacgagagcttgagaattcccgaacagacagtatagagagctcgaaggtagccgtgttggaaaatctcttggacgatgccagaaagatgaaggatcgatacgagcaggattatctggcatcacataaggccaatttgacgcttcaagccgatcttgagggaatccgaaatggcaagagcttgggagatgggtaagtttgaacaaaattcgattaaatagtcattcatgtgtgagcctggtcggcatgtccttactcgtcgtaacatgcaatggtttccaggccggaagctgcttcggctctgagactgaagttgaatcaggtaattggggagttagactcgacaaaggaagttcttgcagaattagaggtgagagttaacaaaatggtctcggccatgttaaattgggtgcaatacatgacccgtactgaacgatagtgtttgtactatagaccaaatacaacaaagcgaatcaagagcttacggtcgctaaatctgatcgtgaatctttcatttagtctaatctcggccaatcgacattgtactgacatatttatttctttgtcatagtgacacttgttaataaggatcagatcgacattcttcatatgcttcgagagtcggtcaatgaagataaagtccagctagagtctgaccttatgactctgaagcagaagttagtggaagcaaaagagaagaaccatatgcaagtggatcaaatcaatgggtttgtgtttttgttatctgatgagttagacttatagccactgatctatgtttgtttttggaatttcgatagactactgttagagaagatcaatctgcagagtgatggaattggccatcgggagaagatgatagagcgtgagcgcacagttgggtaagactccgtcctttgctttcatattatactcaaaacacaactcaatatctcccctcaataactttcatgcagagatcttcgtgttacgctggcggggcgggatatcccagacgacgtcaagacgcgtttgttggacctaagcgaggaaaagctctcgctttcgatagagttagcgcgggcgttagaacaagtcaaatctttgacagatcatgtccagaatgcaaagaaggttcgtttgatgtctcttttgtttgtgcacgaactcttgtcaattaaagtattcaccggattaaatcttcattgtcatggattggtttcaccaaagttcatgcgcgagcaagataccgtgatcaaagatcagaaggaaaagatgacaacaggggtaggagagcaattcgccgaggctcgacagagttacgaaactcagatttcgacacttcagaaggaagtccaaaagaagactgtacgtattcgtgcaaggagatacagagcgcttttcttcgtctcgatttgaagaaaaaaaacttagtgattgatctgtttgtggtatgttgtatgcatcaggccaatatcaaggagatttcgcagagctacgctcatcagttccaagtattgttgtcggcctatcaagagattggcttaaagatttcgaaggatcatgcccggggagtcggtgtcgcttcatccgtggaaggtcgaggcaacacgccgcaaggcacgagctggctagctcagcagcgaatgcaggtatgttttcgcactttctttcttttcaaggcacctgctgaatttagaacgattgaagcaaagaggaacttactgtttggtatgattgggtttcacaactagttgactggtggactccgacgctagagttgaagacggatgcttttactggcttttttttcaaatgaggtattattcttctctccgaattgttgctgttctctcttgggcagcgtacagacggacgtatacaccatctctttgatcacctttattcccctgaggattgcctttgatttatatatgtttccatccgtagatacccgtgaggacgtgattttggaagactggaggatgagaagatgaaaagatgaagatgacaatgcagggaggagaatgtgacccggtagtagatgtcgataagaaccgaggtaatgaatgaggcgagatagcaagacaaaggaacgcggtcgaaagccttcctttggatttgaacgactcgaacgaagatgtgatcagaacttcggctcagaatctagaattgattccagaaagctcaaacatctctactgattacaacaacctcatgagatacaacgacaggtataagaaagatcggaaggggagcgaaaatgggcgacggattaatcatcgtattttgaaggaactgggacccgtgctctcttcaaatctgaaatgttgtattgatcgtttaggcaggcatatatgagaacgaagacagtttcagtcaagaatccgaatcggctgccaggctgaatggaacaagatgagagatgtctgtgggggcccactaaccaggataagcataagggatatcttcgatcctcggaatgttgttcactctcttataagtacggttgccaaagtagtatgtaggacctatattcgtttggataaattgacggttattcaatcatgcaacttgatggcttgtgttcgtgagtgcatagaaacgaaagaggaagacgaaccgactagaaagatggcacaacaccatgagtagaccggatattcatgaaaggctttttgctgataaagcgaaattgacatgtaaacataaccttcaccattgaattaacaaacacatgttatatatacagactcacgataggtctgtacacgaacgacatgatggaagaaaagagagatgagagtattcaaagatgatgatggttcaaacagaagaagagctatggaagatgcgacgggagaagctgtaacactcacgtgtgtaaccactggctatgtttggtctagggttagggttaaatcacatacaggacgagcagggtatgagtgacatctacaacggtaatgatacggaaaggagccagcaacatcctcgctgctgttgctaatgcttctctatgatggtatactacagttctttgctgcttgtattattaaatcgagtagaaagagacatataattatcattccagtgctcaattggtcaagctgaacatttaagtcgtctgacctgaagacctttgaacatggtgatcattcttgttggccgtgttctcaccgctatcaccatagttattgttagtaggctaatcgattcataggctgaggttagatatctcgctcgaacttctctctcatcttgctactcaaaaaaagaaacaaaaccccatcagcctcttctctagatatgaattacatctacaaacatacacaacaccacaacgatccattttgccatttattttgaggatattccgtccatcttgtgcacggacgacattgtcatcgcaaagtttagtatgctgagaattgtttcgtgtatacttccagggtttgcttgcgctcaggctaacaccgacacaagctcctcgtctgcggttcttctagttatatccagacacattacattcgtcttttttatgtcttcgccattcttgagtctttgtacatattgagctctgcacacgacggacagatgatttcgccactgttgtctgtagctctccccatgtacaccagccagtttatcgcttcttactacgataatattgttaaggattcagagttacagattacttacatcgaggttgaagtcgatacacttggtcccaatccctacttttagtgaagctatgtcatgaatcactcgggagtccaacttgatagatcgtttactcatacattgccgttgccatcaaactcatattttcttttcttgatgcattccaaggatctttatcgctgaaggaattatgtctctctgtgatttatgatatccatgttcatctcgagcttttcatctgctcttgcttctgacaccggaaatctcaacttcaaacgatacatttggcgctgtattgttgctgtctggctctcctcaaaaagttgcttttcagggcttgatatccctattcgctgtcccactgtaaacgtacacagtgtgacccggagttgtttttcgcgcctctgtgatagcctctcttcctttcttactaaaatctgcatttcagatgagcatacattgtaattttcaaagtatcattacgcatcgtcccaatcgtcgttttgttaggagtttgacgagaacgttcactaaggtgatttacctaaagaagttcacaatctgtttcagagtacatgaaagtgactaaccccagaacgccaccttctctttagcactccagtcaacttaggcttccttcaatcaaaccagtttgactgcttcttccatcttgattgaaacattttattttaaaatgacctcggaccaaatactgcttattcttgtcggagtggtcggttctgggaaggtatgacggacgttgttatctcctcttccgtttggaatatcccgatagctgacagtcaacactaggtttgacgtcatctttgtgttatgaaacacttatacagtctacagtagcgaacgagttggagaccgagcatggctatgtgcgttgtaatcaggatgaaatgcaagggaacaggcatctggttgagcaaaaagtctatcaggctcttcagaatgtgaagatcacttctcattctgtcaatgtcatcttgctcaaggctaattgaagagactttggttgattcttcaatagggaaagaacgtggttgtggatcggacgaatttcgactcatcgtacgtgtctctttgcgttgagctaatgtcttcagatcagcttcttatcttgttttgatcgtcatattttactgcacaaagccaacgatcaaagtttctgaatatatcctccaactttccgcacgttaaaaaatgggccttgttttgtaagtctgatatgtcgtcatatgtttcctgatactttcaggagtcgataacaaccgaactgaaccaaaggctttgatcgatacagtggatattccaaaagatgtctgtcgaacgcggcttttgaccagaacaaaccatccgacacttgagcccgagagagctatcatggttcgtctctgttcttactttgcaattctttcaagctgagaactcacatgtatgcgctcgtctcgcgaaataggttctcaatcggttctctaaagaccttcgaccgccaacggtcaacgaaggttttcatcgagtctatcgattgacaaagtctcccgaagctggtacattagatcaagtccttttctcggtcgagcagaacggactcgtcggaaatggaatagctcctttcggaggaaacaggcaaaggcatgacggatcaggcaacgatagtggagtgagagaacacggtgtaaatcatagtaggcgcgctgatgagcgaacgggatggtcatcggacccaccgcctagcctatggggaagttcaccctgggctggcagaaatgggcgttgagactctttctgtatcgttacaaaaccacacaatatgtacgaaagcattttaacgcaggatgaagccgatcaccatatagaatggacgaacaaataagttttgaagttgatgagcggattttaaactcggtcaccttcccccgtgcggggtgggtgactaagcaatcccgagacccgaggcgacagaggagaaacccgccccttgagacaacagtcttcctttcttctagcaattcatctaaaatcgcttttccttgtctccgtcccgtttccttcttcttcttttgccaccccatctacattctacatcgtcacaaacccacctatttcatctgcatctcatctagactctcagctcaatcatgctctattccattccttttgctatcctttcaagtgcccttctcgctgctgcatctcccatcctttccgccaggattgttcccactttgtcctgcaaagctatagacctgtccgagactcctaatctctttgtccgctcccagaccgtcggtactcaggctgtcaagcttgatgtcgattggaattccaatctgacttggcaaggccaacctgacgcagcacaagtcgtcgatactggtgtgtttggattcgaagagtgcaaaggccgagccatcaaggcgttcgttcatattccatccttcccgtgtcagatcctgccgagaggcatgataacgaatcagattgactaatgcttttcttttctttcctttcctctttgtcttcctctcatctacagaacttctgactcattaatctttggacacgtaacttggactgtgctagatgttcaaggaaaaaagatgaagttgtgcctgtctgccccctgtcagtctccgatcgtcccgtgttagccgagattatgtcctgtgctctgactcaccgaatgctgtgcttgctcggactttcttccatcacagatccctacacgggtgtcactccataccttgacaagtgttcggagagtgacgacagttctcagttctggtgtgtagtcatctatccgaatattcttatttcctttccttcgactgacccgcgtcttgtgatcattataggcaatactgggctcttgatacttcggattctgctcatcctgttctttcattcgtgggtccggccggttcggttacgacttacaagaaaggatatctttcgcccaaaacctttgacgcggacgccccgcttactctcgcatctgtcaactccaccgagagctactttgcctacggcattgacgaataatctttggatagtgttttactcttaattaataaaattcactcttcgtatgtgcattggtttttgactgcttggtaaaaaagctggtctgcagccctgcagttttatgtcttctcagatctcttattgttactattgtgtattctcttgccgttcatccgaactttcttctttgttccataatgtttcatcacgcttgtcttttctttcaatccttcatcttcgttgtacaatgttcatgatcaatgtcttttgctctgatcccaagagcgtatgtgtaacgaaccggctacttgaacggggctcaatcgcagtaatagaatgtatgataattcgtaactgttcggatggatggcttaaaaataatctgattcggctgacgtcactcatcgaaaacgacgacgacgacgactacttcttcaatatcaactatatttaactagatatggatcgatt

SEQ ID NO: 3210 - DNA, 24364 bp, Xanthophyllomyces dendrorhous
attcattccagaatcatcggtagacgttggctcagaatcccatgaacgaggccatggtgacgaagaagagttggaggacggcttgaagaggaagagaacgggagatacggtgatcgacgatttcccggctcctccagagcgcaggaagcggggaaatggggaaggcgatatggcgccgcctctgaagatggcaccgaagaacccatttgccaagaaagatgccaactccgctgcctccaatccttttgctcggtcgaatattggaaagccggtgactgtgggcaaaagcacctcgttctttgatcgcatcgacgatgccagatcggttgaagattccaaatctaaagatagaggcaaaaaacctactgccggaacgacagcggttaaaggttcaaagcagactaccctattcggtctacctcctggtcaagagcctgtcaagaaaaagtctggacgaaagcctcttgagaagaacgatagcttgagaacggttgaatcagatgacgaagaattggatccgcaatcggtttccaataaaaaggcggatgggatgggacgcgctcaaaggcaaagttttgagacggacgtagaggagtcgttcgaagatggaacagagacgcagagaaacgaaggacttgatttagaagaaactcaagtcgattctctaatggagaacgatgacgaggagccgatgatgatagatttgggggacgaggacgacgttgaagaggccgctgtaagtaatattctttgatctggccgcgtctaggtacttttcctttcttttaacaattcatctgacacatgcttatgttttctcctacacgaacatacttcgctctgcagaaagagaacttagaacctgtgaagaatgacggggtgtctaaactagctgcgttccggatgaagactgttgcttaggctatgatcttcataccttacgatcacttctgcgctgtccttcaatctgtatctttccttttgttcttatcggtgatataatcttatcaaaacaattcttccctaccactcttcgtgactccggtctgtatgtattcattgtgcgataccctttataacgaatgatgtttaactctagtgattggctccacaacaagtgacggtcagaggaaagaccatatattgaatattcttctaatgctttacacaacgctcttgttgacgttggaaaagccgacgccgagacaactcaagatgaattcttcctttttgggcgcagatactgccgtcgactcgtcgtcatcctcatcctgatcggattctgcagaagattttgaggcgactgtgggtttgacaggagtaattttgaaagtagtagaaaagaatgtccgaatgtcgcgcataagttgtatgcttcgttggtgtcaagccgagataaaatatgaaaagctcgacgatcagtaactgtcatccgatgcgttgtgttaagaaagaaaatcgtcagagatactcacgaattggcacttagtttgcccagcctaactcttcccacatcttcacttcccaataccatagcgagtaagacgaaaccttgaccgtatgttcccacacatccacctccactgatctcacttaacaagagcgccgccgtggctcgtcctacgtcttccggagtctccaacgaacccttctcgtaaccaacctcagcacaatgcattgctcccgtcgttgattctgaaagaagagagagtccatagccgggagacaatcctgattctgcagacttgtagggatcagtgtagatgtatatatctgggatgaggggattgagcaaacttctggaagactcgactaatcgatttgagaactgaggcgacactcggaccgaatgagccacacctcggattctcttgactcgacctgggtccacaaagttcaacgtcttgacagatctgatggatggacaacggaacagaatttctccaccaccgagcggctcagctcctcgcttgacgatcttgagttcaagtccttcgagttctccaaagagttgcatcgttgggagaaggtaggttctgatcagatcaacacccaagtcttttcggccagaggtgatacctctgagagttaaagagaggtccttctttccccagaaagcaagctgggataacggctcaaggaaataaccaacagaaacggagagagggcaatcgtgggtgtggtgtccgccgagaagaacaccaggggtaaatagaagggaggtaccggtagtagagatatcgatgatggaaccattggtgatcttggagagaagtcggagaagcgaaatttcatgatctgaagagacgttttgagaaaaaagaaatacagacaaccatccagagagtgaattccaaagctctgagaaagaaaagggctagaaacacacgaacctcggagacctgggttcacatcgtcgcttcggatacctcctatccgaacggtccttccagacagcaaactgagaacaagacgttgcctaatatagagatgcccggtaaaccggagaatgtttgaactaggctgtgccatggcgagaacgaatgagcgacgatgatgaggacggttggttgtttggatggtatccaacaggtcttgcttcagctaaacactcgaaaatgtttttggaatttttggcggtcatcggttagtaaccgggaactcaaacattttgttcatcctgcccaaccaggattcttgctttctcaaccaccatccgtttcttcaccaatcatgtccgaaccagtttcttccgtaaagtgagagagttttgattgatcctgtatggtagctgtgcttgagagctcatcgttcaagcgtttcgacatatcagaacacctacgtcctcggcatcaaaacccaaaaaacggttcgttgggacgagctcaacctcgtccagaactcgagcaggtgggccgtccaaggcgagagtacctctcaaccagatccccgatgagatcttgaatgatccagaaatcaaccgagccatcggggcgcttccatccaattataacttcgaggtatgtgtctattttaagggataagtacgttttatgagagaatcagtcaagataaccactgacaaacgacatattaacttgatcagatccacaaaacgatacatcaaatgagaagagacaacgtgcaagccgttgcgctgcagatgcctgagggcttgatgatttacggatgtctgatcggagatattctggaaaggtaatcgactgggacgtgaccttggaaccgcttgacgtttcaaagctgacattcaatcgacccttttgtactttcaaaggttcacgtcagcacatcctattcttctggctgtaagtggagtatggaacaacgtcttttcatttcggaactgaatgtgactgacaggtgtctcgaattgtttcatcattcaatatctctataggatgtcacatacggtatgcctccacttttcatacctttcatttcactattcaacatcaaacgtgagcctaaacaaagtgaccgcaacgtaatacataggcgcatgttgtatcgacgatttcactgcccgatctttgggtgctgatatgattgttcactatggtcactcatgtttaagtaagcttcttgtaacttccgtatgcttcgatttgtcacgttcaagctgacactgatttgttctgcgcgaaatcatcaacccgacagttcctaccacgcaaactacactcaagacgctctacgttttcgttgaaatctcaatcgatgcgcatcacttggtgtcaactgtacgaacggccttcccgtcttccaaaaacgcctttggccaggcggttttgcatgtcgatcgacgagctgcaggacatgcagtcaaccaagaagtcaatgaacaactacgagcagaagcggctgaaaaagtcgcggcagccggagagggaaggaagcgtatcatggttggagttgagccggaacctgtggaggatttcccaaacccaactaccgaagaagagaagaaaaacaaaacaaacgagaaagatggtgatgatgaggaactaccaacaaagttggccttggtgtcgacaatccagttcgtagcttccgttcaggttctacgtaatcaactggaagaatccctacctccactttcatcacagccaaccaggagtgagcctaccgtcgaaggagatgctcaggctctggcggtgctggagaaagagaatgagaaagatgaagaagagaagggactttggagaggaaagtatgagattgttgtcccccaggccagaccgctctcgccgggagagattttgggttgcactgcgccaaagttagcgagcgacgtcgatgcattgctgtaagttgcgctgtattaatcctttcaagattttctcgttgattcacaatcggtctaaattcactcttccaaagctatgttggagatggtcggttccatctcgagtccataatgattgcgaacccgactgtaccagcattccgatatgatccatatagcaaaaagttcactcgagagctgtatgatcacgaatctatgcgagagagtcggtcccaagctgtaaacgtagctcggaagagtttggtggttgatacaacggagaaaggaaagggccaaggtagctgggcggtcgtgttgggtacgttgggccgacagggtagtgtaagcgtgatcgacgtgagtatcttctgttctctatatatgcgtatgatttggctactaatgatactttttgtctcgttcaacggtcactcgccagtcaatcacgtcgtcattggccgagacaaagacagatcggacagaacctcctctaccattgctgatctctgagctctcacctgccaaggtgtcattattcccgccgtcgatctcaatttttgtgcaaacatcatgtccgagactttcgatagattggggtgcagctttcgggcggccagtcttaactccgtacgaggctagtctggctctaggcaaagtcaaggtctctgctggggagaggacggctggatgggaaggaggaatgactgaccgaggcgaaggctacccgatggacttttgggctgtgagttcctataccaacccaatattgattgacaagaagaaccctcgaagcatgagctgtggctgactatcgaaaatatcggaaccttttcctaggacgactcgttgggaccatggactcctcgtcatggcttaggtcgacctaaacgaagcgccactggagcaaagccagccgttgtttcgggggtggcttgagggagaaagcatatgtttgcgtgtgtgaagaacactttgtacgactcatcgatgaggtaatgattacttatgattgcaagattagccgagcagctctctttattctcaagaacgcgatctatgttactaccgttcatacaacctgtcccggctttcgttcaattctctatcagatacaagtgcaagataaccattgaataattctcgatatcaagtaagatcgagtcttttagattgaaagtcatgaacagctagacaagagacatatccgcacgacgaatatatgatcaacaaaactttaaaccagaaagaaatgggttagaccgtttcagacgtccacatgtgccatcgatatgaaatatgatcttgacgacggaacttgaaggtcgttctcctctcactccagatgaagcagcgcttgctcaattccatagacacatgtgttcgtctgtggggccaaagtcacggacgacgattattgacaatacaccattcatatctgatgggattggcaaaaccttgaagacccggtccttgtgatttgagcgtccggatggtagaacggacggtcaacctccttccgacttcttcttctggcttggtagatggccgactcgagatggctcagaagtttttctcttttgggagtgatgctgaccatcgatctctgtacaattcactcgtccacacctttctctacatatctaacgactgtatactgaccggtgatcttgcatcattcgaacgatggatcccttgcatcgatccgataaagactctcttcttgccactaccaatcgttcctttccttctaatcttaccaatgccctcgaagcggatcaacggtccctccgagcccgacggaagaggtctaccgtatcgtgccgtcagttatgtgtagtatttgctgcttttgtcatcttgttgacctttgcaggaattatctttattatctacactgtcgcaagtgacttgtatgagtacatccgggaacctcatcagtttgctttcacaaccgacgacacagtttcggtgatcaagatattatggagaacgtgtgcctcaattcgatgttgtggccaacgtatatatcagatttggaaacccgctcacggttttagagtcgacaggaaacgattcaaagcctgagcttcccagtgaaaaagagatgtttggagaatgggagtcaattttcagtaaagtgatctactcgaacatggatatcaattccacaaccaagatctttcacaagaccgtcgagctgcctatctcttacgatgttatgtacgtggttattctttggaccttcttatgaagattagttctcgtattttttgtccctaagtgttgatatccgactctgttgacgcttgtcttgctcacaaaactttggatcacgaatgtatcaacctcacacgtactttcctcagatcgtcaacacctttgttgtcgttccatccgacccggatcctgtcttttctctccctcacccacccaccttgacggcgttcaacttgacagacgctattcgtccagaccctgcatacacctcatggacaaaatatcctcttgaaaagcttgtccgtcctgtcgacccccaactgaatactatagacagcgatgacacgtctcgttggagaaacatctctgcatcgcttgatgcgttttacgacaccgccgccgtcaaagagttcgccctatggcctgtacaaaacagatggactagctggagccgtttagactcctccacaaacaagacaaatgagacgacgaatagtatctttccagtaccgaacgaagtggatgagaggaagctgcttcatgtccgaaggaatgcgagtgtaaagatcaagacaagcacttggatctcgatggcgaagcaaactcccgtttatgatttggaagagtatttgctttacagggatagcgtcgttcgttcgatcttgttctcaaatcgaagattctgtaaattcaaacgccaatcatcctgatttcctcttattcttttttcttcttctaggagttcaatagtgggatgacagatatcttgagcaatattgatcaagaccagctgaatcagcgaggaccaggtatcctacaaagagattttcacatcgctggtcatcccgtctcattttgttcaaaacgcctctctggtagacacacctaaagagagaagccaatctgatatcgagattgagcgtgatttggcattctatggacccagtttgtctttacgtatgtaaaatcagatcaaataatttttcttactttctctttttgaagcatcaattttgatggacattggttctgacttcttgacctcgttcgttcttcatcgttgctgatgtcatgattgaaagatggacacgcggctggcccgtatgactggatcactctgcctcgtgttaatgcatcatcgagcgatcaacctggtagggattctatctcattcatctcatacaatagatggaacatagagtgactatcatcatctcgagctgagcgtccgttccacctttgtatttgtcgcgactaaattctgtcatcttggacagaacatttctttgtcccgtggcatataacattcgaacttcagtcgaatctgaaggttttcgctgtagggaaagcaaattggttcatcaaggatccgaaaagcaaaccggacgagcatccgatgaatttcgcatacaatgaagagaaagccttagaaagtcgagaaatctggcgtatgtgtcttcaaccactgtgttggcatgcatatgatttggggtttacctgaatactctttttttgtcttctgatcttgttttctaacgcgcgtttcattttgtatcacatgttgatggtcaaacttcagactcgattctgggtcaccataatggatcctctcgtcgacctatccttcgggcgatattccgactcgtaggacacttgattcaatttcctggtcttatcattcttcaggtcatgttcgtatacactcgaaactcaagtgcaggtatcagcatcccgtcgaatcttctgcttttattcctcccgatggttcgagtagcatacaagttcagttcagaaccattaatctcgaagggagtacatactatagaaatggtgtcctctctgtcagcaatctggctatgggcttgtctctggtggggcttcgagatccaatggggcggttggaacgctttattaccagtgggagtgaagaggaacaaaccgactcattcagagagaaggagtaagagggtcgactctcaatttacatggtttcaacggggtctggtcagtttacttctcggctttccttgtagacagaaattggatcgacgaagaagtagaagctaactgcagagtcttgtgctttacggccatcagtttgtcgtcgttctgaccatatgcatggcccacgtccacaagctcccagaactaatcacttctacccatcgatacactcggttttcgacctccactccctctcttccttgatcatacatcggaaagctcctccaaaaactctcagagtcaatatatgccgaatcattttcgcatgcagtggacctgatggctaccacgagtcagatcttactgaataagagattaggctgttttggtggatcgtatccgtctctcgcgtgggctgaatttgtatcaggaatatgtacgtttctttctctccttctctcagtctcttgaatatcacatattcggttgaaaccaaagacgtatctctcacatataactaatatggacattggctgaaacagtgatatgggcgcctacagtgttgcactcgatgtttggtaaatataacacgtcggaccctgttcatactggggtcgtggtcgcattcctcatcaaagggactctgctttggcaggctttgaattaccccgtcgtgaatcaaaatgaggaggaggatgagtagttactcgaagacgagatccaaagattgtttatgtcgttatgctccaaacaaggacttcgcaaaggaaatatcagaagaagtaataagtgaaagcgaatgcagtaagaacgccgaaatatatagtgcctgccggaagattcttctgagtctaacagaaggacagaaaattctaacatcgtgtttcagcatgttgggatattgctatatttgactcatttatatcgagcattagaaaggaaagatgtaatctaacggagaagataaagagctcaacgaacttctgaataatatcccaaggtgtcaattgtcggtcgaacaatacttcttcttttctcccgagacgtctgccttcgtgctctggttgaattgttgcgtcgacggcgcaacatccagcgcggggttctgctcaaaaaagtgaacaggctacgaagggtaaaagaatcacattatcagataactgtgaatgcaactgagtctcgatagatgacttggataagagacagcgcaccttgaaatgcatacggaaggtctcgacaggcatgacgggccagtcttcaggcttggttgcatgggtgaatccaagggtgaaccaaacgactccctcgccagtcttgacttcgcgctgacgagctgcccaggttctgcatcctccttgacctcccacagattgccatgggtgtctgttgagaaagtaaggacaagcagaaggatcaagttttaagtgttttggtacctacactaaacaacgtgttatcggaatttgatccaacgaaattgacttactctccagcagcaaataattcttcctcgtcatgcttggtgtaatggatatgattgttgacaaactctcctcgctggttatgcatactggtctcgtgagccagccccaactgagttggcggtgcgacaatcttataaccgactggcttgccactgtgcctgttgagctttgaaggattaatcatcttcacgactcggtttgtttgccaatcgaggttaaatgctccctctctgttgaccttggtctggcgcgtctcgaacccaacgccgtgaggattcttctcattgcgctccattgggtgggtctcgtcgtacacgactgtagaagattcgtaaccatcgatggcgggatcgattcggagattgaagatgtgttgatgatctgagatatgtacacaaccggaatcagctgagatctctatatgtgctgtttggtgtagtactaggaaggcttacccggtgcaaaaacacctggtgcgacaacactaccgtatttgatcgtgttagctgcgtcgactcctgcttcaatcggggtcacagacatgattccagttgcacgaatttcccaatgaagcactccagccgtgtcgaagatccagtacaacgcatattcgtagtttcctacagtcagaatcagctggagaacgagctcacgggatcgagctacgtcagcccgaccagttcgtacgttggtatgcttccaaccaatacctagatatcaggaagcccattagtgactgcagaaagagatatgtaagaagttttagaaattgaactaaatttacctccgtcttgctcgtgtacgcatatagtgttaggcaacacaaggggagagccatcgggcttgactgcaagcccatcgatatctgtgaccgtgaatcgtttgttgatcagtatggtataagctgactcaactctttctacaatgttgaaactcacagtggatgacaccaaggcaatcacaaccaagttgtaagttgtttgccatttgtccagctccggcctcaccaaagtcgtaggcactctttcggtggactgttggtcgtgtgttgagatgtgagcaaacggtcttaaccttatcagcagatcagatcgaaacttaccaggcgacctcggatctccataaggcactgtcatctcactagtactgactcgatagaagataggtcggccatcatacttcacatccctgagaatcatgccctcacgcaagtcaaagttgagagtgaaatcccacttctgccatctaactcgctcaccctcgatcgtgaagctaactccttggggctgagtgatatgaatcggctttaaatcttgacgaagaccaccaggaagcaactcaggggcatattcagaatcggcatgatgctgtaaagtttggacaagattgaatgaaaaacccttcagatcaagcactacaaatattgatgaagcgcacctcgtatgtcttggttggatcggtcgaagcagaaaattctgccgtggtgggcatacgatcgatccggattactgaaaaatctcggccatcaacaacagcagctgattgcacgttgtcaagataaacaaatagtcaagtatagataagtaaatggtctagattgtcgcagaaaaacgacttaccaaagtcgagagggtggccatagaagttggcagaaggatggtgttttgtttctttcgaattgaggaacatccaaacctgtaatgaattgcaatgaaagtgtttagcttatggtgctgacaaaggcaaagctagacaagagtattttacttcgaatagtcgaagactctgaggttcatcatcagttccatctatgatcagaatgatgaattacgaaagaatcagcaacagagagtaatgatcgcaacaggtaagaacttacaaggccatggctccgcgactacctcgcatccctctggaatttgcaacctcttcaattcagcctgtaccattggactcgcaagagcgccactttgggtcgcagaggatagatgaggattagttttgtgcaacggtgtaaggatagttatgttgacatcactggtactcacgccgcaactttgaacatttcctcatcatcaccaccaccgtgctaaagaagccaccaagacaatcgttgacagcgtcaggctcaaaggattacacactatggaccttctcctgtgataagacgaaagcactacttaccataccctcgagaactctttgtccaataactttaccagcgccgatgtccactaacgtctcgatgaagggcaactcgccttgaaagtagaggagcgcttgcgctcgtcgaggaggaggcgacggcaatggatttccagcgttgaaggcaaccaagtaaggtaaaacctgagctttaggcggttcctttaggtatacccttcggaacgagcatgatttagtcgggttataggctttgacaatatcggtgaccttgactagttcttctgaagtgagcgaagcgagaggatgaagctgggaagctgcagatgagtctgtgctaggcagagccttggcaagagtatccaagactatcggggacatgtttctttgcaagtgatgggttgagtgaggagaatgatgaacggaatctcgcctggttaagttgtttttttatctatcacttccaatttctgacgctagtaagcgggcaatcaagcgggcgatcatctaaatgaactaatcataaaccggcaggcgcgacaggcgcgatgaatacgaaagccacatcaggcgcgataggcgcgcaactcgcgcctgaaattagagataagatatcgatttactcgttcatattgaccggtgagcgggaagcaaaataacgatgaagcagctggtgaaggtgaaatcttcagaactagacgaaagtgtcatgctctccgtgttccatccacaaaatctatacgataagaatccaatcattgactttcgtagcttacacaaacatctttcccctcaaagttcttatcatcaaagagccgggccattcgtcaagatatgtcagacatataacgctctatcaaattccattttccgacgattttttctcctactcccaaacatataccttctgtctcaaaacttcataccgtacccattccgtgaaagatggatgatcccaagaataaaacaggagtatacgcagtcagagccgtcgaggttgttagcgacgctggaggagagctagaacgcaggaacttcgtcagttgtaccgccttctgcttcacccggtttacgtttcactgaacatgagccatgatatctgtagggtactgcaggtcttcgtggactcgcttgtattgtgagcagaatctgactatagcctcaagattttaatattgatactgtgcctactatatgcatctctcgtgacccgtcccgcttccaggtcacatgcgtgtatttatatttcgcatctagacgttcaccaatcattcatggtcgatactgactgaagctcttatacagatacgcgacgattctcacgaagctttcaacatgtgtcaccagcggaggtcctgtgttgatggtttggggtttgatctatgctgctgcaggagctatgctcatcgcactcagtttgggagaaatggcatccgcgtacccttcttcccgaggaccaatggagtgggcatataacttttcttcgccgaagcatcgtcgctttatcgtaagcaaacttggctgttgagagatatttgggtttgtacttccagtgattgattctttctttcttcacacagtcttattgcaccggtcatctcaattatatcgggtactgtgtcattcttgcgggcttcggggtgctgataggtcaacagattcttaccttagtggtgttgaacgacccgtcatttgtcatcacgcaatggaaaggttcgattgtttgttgacattctcttttacaatctcatgctaacctggtgatgcttatttgacagtgttcctcatcgccgaagcggccattttggccgctaccctgttcaacatattctgtatggctatcatgcctatcatcgatatagtctcgctatatttcttcttcttctcattcttagcatacctaattgtacctatcgtgtgtgcacgtcacctcaaccatgcgcttaagactcccaagtttgttttcactgagtccatcaatttgaccggttacgactcaatgaatggaggagattttgtggccttcatgattggcctttcgggtgtttcaacagcgtttggaggtgagcagtcagttattcatcggtacaactcgctcatgatttttctatcattgaattccgacatatgttgtgcctgctgtaggtacggatgcagttgtgcatatcgcagaggaatgcgagcatccggagagagatgtgccgagaagtaagtggcacttacgttagttcatacaccatcgattcttacttcggaacttgcttctcttaccatctgagcagccatgtggttaaccgttgtaattggattcctcaggttagcactttgaaccttttattgtatcgattcaaggaaacttgacgacttatcacttttgccctttctgaatatcgtagttcattcgtgttgctcatctcgcttcttttcgcggtggtcgatatggactctatcctgggcaccgcaaccggagtaccatacatccaacttgtatataacgccactcagtcgttttcggggacagtatgcatgtctctaatgatcattatcatcactttcttggccatgatcggtacgtcgattttcttgctggtcgaaatctactaacatgctcatatccacctcttacttaacaggcatggttctttccaccagtcgaacggccttcaccgtagcccgtgatggtggcctattcacacagacatagtatgctgcacctcatttgaacgaaacttgatcatattgactgatgcacaatatttcgaccgacgatctttttgatgcagcttcgctctcatttcacctcgctggaacgttcccatacgtgtaatgatggtaacttcagggctcagcgcagctttggcatgcactatcttgggttcaacctacggtgaagagacctgatcaacattatttctcgcagcactcgcatggatgggcagctgactatgtcctttttcgtcctgcagcgctctactctttcctcaactgtgttttactgttaaactggctatgttatggtacgagtggattcccaccgccgtgatcatgatctcgatagctgaatcgttacaaccctaggtatctgtatcgtcgcacttctcatttccggacgaaagtaccatacgtcaggaccgttccgtcttggccgagtcgggtggtcaattaatatcctcaccgtgatctacatggcatgtcaaagcatcttttttgtctttccgtatggtttacctgtgcaagccaaatagatgagtacgtcatattttcgcaacatacttagtctcgaagctgacgtgttgaattaatcttctctttcttaaccctgtctgctgatggtagactactcgtcagtcgtttttgttggtttggtcagtctagtacaagtggcttggttcgctacgggtcggaaatactatctgttgacaccaaatgaggtcaagtaccaaaccgagctaggaggtgggaccaccatttatagagacgagcgagatgagtcctatgtgggtgcaagtgataaagatgatgccatcaccactgctgcttgatgaccggcttgaatgatcaaattttggtgatattgtggtgatattttagtgatatagaatgctttatgcaaaactattagattttctatatgttgtttgcggaagcacgaagcagaaggatcaagaaagctgccaagcggaatgtttgcttcttcaggggctgggtgatatacaacaaggactttgttcaaggagtcagcaacgaataacttttgctatgtgtcataacatcatctaaatcagttttcctctaccctctatctaggatgcacaagtttacgtgagataggaggcgactgtaccatgtgttgaaaccaagaatctttgaacgtgatttagccgaatcaatcctcttcctaagccggcgtaatcaagaatggagccaatgctcgatcttcgataagatatcggatccggccggttacttgctgcgcaatctttgcccacgtttttgaagtttgtttcccatcatgcgctattcaccccggaccgactaccgacttactaatcctaacctgcatttacatctacatactaccatctataacatagccaaaacgactgtcgatctcattgctctatgatgtccgagcccactactggtcccaagtatttgaaacgtggcttggcgtgagtgtcgtgcatggtttcaattatgtcttgttgccattctcatttgaacactgtgatgattggcaatctttgggtttatgctgataatacaaacagctgctcaacatgcaggttggtactcatatcttttctcaagaatcacaattcaaacaatatacctgatcagccatctgacatgtcaagtatgttttgtccggcttgcttttcacagaaagaggaaaatggcaagttgacttcatttttgaacagacccgctacaccattacaacgttgcataacctgggacagtgttgtctttccttcgtcggtgggaattacatatcagaaatggtatgagttttgccctgttcctcatcatttcaatgctttcagttcagacttgacatctcttgtgcagtacgggtgagaggcctatatgtggaacgtgcaagaaagtgagccgtgcaatccttgcttgaatctatagatcactctcaaaaatagctttgataaaagcatgaacatcagccaacacaccactaatgttattgaacctcacagagctcccaaatatgcatgtatgatatcgcatctcagcaggagtcgagaaggaagaatattagaggataagatttgttagtttttcctgaactatctgtactgagtggctgaggttttgatttagatatcgcctgtactgtgtcattcagctcgactagaatctattttatccctatcagaatccaatgagtccgctggtttctctctatctagcacggatcagaggaagatgtcctctgccatatatccctaccctgtccttgaatatcccaagcccagcactccttcgagggtctctcatcccagccgactttctaggcggcaccagcaggcgacgttcacccaagcgttccaggagctatggaacactagctccagtgctgataatatcacagttggtccaccatccatgcaaatcaatagcgtgactcaatcgaccgtttcatcgaactcctctgccgagacgaactcaagtcccatgcatgtccccacccagttcctcgatcaaacagatacaatcaggcgcgaactcgagccatgggagttcgacttttcttcactagatcaagagaatgtatcgaagtcaacggcggctctgggagaccttgctccaatgcagctcggtttcttttcttctttgcagctcgactcgaatcaatccttatcagaacctttcctgatttcaattgggcaaccgaatgaatactcgccctcatcattggctcaagagtcaccctcagtaccactcgtgacttcttcgactgaagatcgtacagctactttgaagacatatattcaagagcatggggatgttccgataagaattagagatcttcttcttggggctttctttaagcagatgaaaacatcgggagttatgattcatgttgaacgattttggaggtatgtctcgttatgaaaggattcaatgagaaaatccgttcttctaatcagtgactgagctaacaaaacaagttctggaacaatattgtggttttacctcaatttactgattcatcagtaagctcaaagatccagtcaagaacgaacgaccacatcctgctttcttgttcgctatggtccgttctctcatataccatgactcccctattttcgaaggttcaagaggttctcgttcatcaacatcgttttactcactcaaagcacaatgttgatttcgtatgtttgacggagatagtatatttctgccagtcagctctatccagacgaatctgttcaggcttcgcaaagtttgttttatcacacagctaggaaacatcttgaggatggaatcgatgatcaggacgagcggatgattgacctgatccgtgccgcgacagttctgggcactgtagcatgttagctctttctctataagcatatctgatgaaatcacataatcacgggtcatgttatctgatactgatattcgatctcggacttgaaccaagattcgaaagcgagattccgatcggcttgggtcctaggaggagtaagactatctccattgcgttctcgatgtgtctatgatttgacatggcctcgtcctttcaatcctactccattgttgacgagatgtatgttttatcttgtacagatcgcaatgcggctttgcgctctcgctcgccttcaaagcattagttttccattctgtcctagttcattccagaatcacagtttgggccctcctaatccattcagagcaatgctggccagagtcaaacgtcaggttcggcccccaaaggacggaatcgaatgcggagagtatatatgggctttctggcaagcttgggtgagtcaactcttcacatccaggcgcatggttgaatcattccagagattaccaattcgtcgtaaactatttctgggctgtctttgtcatcttacatatattcagggtctagagaggtgtcattcaacggctgctggatggacccctgtaagttcttggtaatatcctgtgaccaagactgagatacatcaaaaatctaattaaatcaattgctttttgaagtcaatgcactggtcagagattgagacacccttcccattgccgctggaacagtatgaacacgtaggtcgatcacgtatgatggacaggatatgacactgctccgtattgaccatgcactttgtttccttcagattgaggttgtcaacagtcgacctataacggcggtgtatggtttgtttgatgactcccaacacaccctcgttggagacctgtatgtttttcgatttttgcacatctcatccttctagtttgcatctgctgactgatctattgggctgaaacactaggagtgcatcatgtcagtttatcggaaacctgttgttaaacgaagcagctcgactcttggatgaattcatacatccttcgactcgtaataaatacctttctcaaatgtcgaaccgaacagattcattcagtccttcttcgcaggaagaggtgttgtctgaggatctgtcgaccgaatctgacagctctgctggcccaataactgaacctgtaccatctgagattttgcggttgcaagacgcgcttttaaaattcgtacggtcacttccatctgaccaggcagaccctgcgaagaaagttcgggggggaatgccccctggactctggatcctatgatgagagacagtctgggtatgaaatcctcgtgggattcatggggagacacttggggtgtcgactctgaagttgtattgttacattgtgaaatccttaggtatttaaatcgtacattgtgattggtcaatcatgtcgaatagagacatactcatgtcttctgtaaacgtcttcactcagtgcattcgctttggtatatcgacaacgagcggtgtttgatacgagtgcacgcgcgaaagccgtgtcgtctgctcgatctatggtaaagctcatccgtgtcatctcagatgtgaacttcaggcgttgcagcttcgttatgctagttcgtttttttccaaaattctagaaagctctctcctcttttaagatatctaagatgatggaatgaactgatgcccggatgatatggttttatcgataactttgtaggtctcttggcgaaacgcagctcatattttgcttgaggaagtgagacgtcttaggatgcttggaaatgaggaaggtctgtcaatatttctctgtctgcttaagctagctctcttttcttacagaatcaggtatctcatacactcgacaacattcttgctgatgtttccttcacttctgattgcattttcgcggtaacagaagcattgacagtatcgattgacactgagcgtacgtagagttgtaaacttcactttgaagcaagacaccgcaccgctcacttttttttgtttttgttgaatgcgatgcagtcattgttctcgcaatgcagcgaatgggggaagtgtacaccgttgggtaagcatgctagacatcaaaacttcttggtttgagtttgatcatgtcgcctgacgtaaatcctgttcaaactgaagtgatacctgtcagaactctgctatcgaggcaatcaaacgctaccaaagcgattagagaaggcgtctctttcatatatgacctagtcaaactgatgaatgccataggtcgtcatcgtattgccagtaatgttttgtctcttcctcgaaatgattgtttccatccggcctttatattttgttttcagtcacagactttgtgtctgatcctattcatgtgctgttcattcccacttgacgtggtaatttttgcgcacattgataaaaatcaaaagaatatcagacaaggtattctggtgcctttcgaaggttttgttatatttgagatcatcgatatcacaacaagtatacaccaatcatatataaaagtgtcagccaaactccttcatacagccttgaagaaggaagcatcagcgtgcttcatctcgtcgagcaggagctgacccttaggctgccagccgaatgttttcttagtccagctagtactaaagtcttgatgagcctgcaagaggatgccgaagaagccaaagtccttggcctgctctttggtgatggccttggtgtccatcttagtcttctcgccaagcacctgagcaatggccttcagttgggggaattcttgaacggcatggacaatagttccgggctcggccgtttcaagagcgagcacaaagagaagagcggcgtcgtccgcgttgcaagccgaccagttgagcccctcgacatatggaatgaaccctgcgtttctgcccatgccgaggaggaaggtgtgaaacatgtgaatctcgtccgggctgtgggtattcattgccaatcggacgacgatggatcaaattcctcgatccttgtacgccaagacagccttctctgtctcagctcttggtccgataggcgcactctgggaatgctcgtctgatccaggctgcacagcgactgtaccattcgccgaaatcaataccttgccagatccttcgagtacgtcggcgaagaagtcgagagcctcgcgctctcctttcatctgactgcccaaatcagcgtccttgtggtccattgcgcagtgaatcacggcgtcattctcgttcgcgccctttctgagaagtccctggtcggcagtcgtcccaatcaatgcggtcgcacccagtgcctcaatcttcttagctttttcggtggatcggacgaggccggcaacagtgtgaccacgagagatgagatgggggataattctagagccaagtcgaccagaagcgccagtgataaagaccttcatatttgttgcgaaaaaatttggttgagaggtgtaggtcaagatgagtaggttgatatgggtgagagtgttgttgagatgtgtaactgagccgtcatctacaacttggatagagcttccttatatacgaagtatccttgaatgtatatccgtcgatctcttggacaatctcgggggatccgctgagtatttcttagcctttgtaatagaatccgaatccgaatccgaagccgaagccgaagccgaagccggatatgagttgcgcccgacccggaaatgcttacctgaggggaagtggtaagtgttaacaaggctatggggtgtgaactggaaccaattcacatgatcggttgctatgtactacaagaattgatattggattgtttttgaacagaagaggtggataaagatcgcgtgatatcagtcagcagttgttgttgtacaggtcagcaacggtcgtttatgagctgcacgcggcccaatgaaaccgatcatatctagcggaagtacttcaactttttttctctatctctttgtttgttctcgttcttgtctgtgatctgaaaagctatcacagttggccttcacagcgttgtttataaaggtcaacgacaaatcggattgatcagagaaagtctctacgagggaggaggcatcacctcaagagctgatgaaacgcaaagaagctgaagtaatgggataatctttcacatcataaaactcatcagttgcgtttgaaaaagctcgatcctcttgtgttagcaataaagcgcaagagaacagctctggccatggcaggatctccccccgcctctatgcctgacacttttagatgtatagcctgacgtcaatctgttggataggtcaggacttgacatcgctcaaatcataatcatttctatggatgattcatcttcttaatttgcagaaggtgccgctcggaaatatacgtctagcgagaatggaaacgctggtatataggtccagaatgatttgataccaaggatcttatgtggatctgcttatgtaaacccctgtgatacattacctccacattgtcttgtgtagaggaaagatgtgaccgatgcttcgacattgagatacttcgccgatgtctcatcaacgatgttgatatctttgttggtagatggacgtatggctagtccccttgattgggttactttacctcatgtcgatggaacttccaacgagtgttctagtacgaatatatcctctgtagtcttcaattccgagaagaatagaacgatcactcagtatcatctcggacgcgccgattgtatctctaattatacttctacttctgatcatttgttcatataggatgagatatagaggatggattgcgatggatatatcctcttattaccccgtggtaaaccacattcggacgtcgatcgaattcagtgacttataacatcgaatgtattgctattgtctcgaacgtcgtcgacatgtaaaaggatgaacatccaatgaacgctgtccatagaagaacggaagcgctcgagagccgaaacttttgaaaatatatatctttttccttcgtattgctcttcatcaacttcagagctcacttgatcatgttaattgagtttcttccctattatctttcctgttgagccttccgttcgcgtgacctcttgctagtcagatatcggacgtcattttggaacacagcgatgaatatttgtggtcgttcttcgcgatgtaaaatgagatgaagagctgccttcaatcctgctcttcacgcaacgctctatccgttcgtgaatgttgtcttgcttcttaaatgactgtgctatgaaacgtatggctttccactaacgccgctaagatcctatgagctggttcactacgtttccagacatttgtattgtcatacttcttatctatgagcaatgatacaacgccccagagatatgtgacctcggtcgcgcaaattcaaattagttattctgatacatgtgatttggttcacttttcatttcgatcaatgtttgtgaactttcaaaaggctgggaacgtaattgatataatcattcacgaggactacgagtacagatacaaaattgacagaagaaacagagtgaatgcggtctcgacaatgttttagaaatcgactgataggtttctaggtatctcaaatacagagagctatggtgctatgtttttctgactatatgtatgacagtatcactctataacaaagttgtgtgtgtgagcaaagaaaagggtgacaataaaacaacagacagagtaggtcggggcacttgcattcagctatcacctgaatcaaatgaaaaacccgaccttcatttgttgttcctctaggaactccctccaacaagccggcgcgacccctttttcatcaacctctctccacagcctctcgaccgctctgagttgctctctgtccagctcacttctttctccttcgagtaggccttgtcgacatgcctcacgatcggtttcggtgacagcgattgtgctagcaagaaaccagattgcgttccgcgacgaagagcggaaaatatttgacgcaggatgacgagtagacggttgagacagtgagcttgaaaggagaagaatctgagaaagcgattgacggaggggtagagcaagcgagccaagttgtgccagggatgaaaagagatagatcaaggccgcctagtcgagtatgcagctgatatcagcaaagacaatctttcgaatacatagacgaacatacatcaaagttgtgactcacatgacgccacgtttc

SEQ ID NO: 3211 - DNA, 5588 bp, Xanthophyllomyces dendrorhous
tcacatgacgccacgtttcctgcgtcgctaaatctgatataacctcggcactgttgccaggtccagctgtgttcctagccagaactgcatccgactcgaaggcttcgatgcgagttttgatcgcattcaccttcgactgtattcgctctggatctgcgttgcgggcctcggactcgtcaacgacagcattactgatctcggcgaagcagcacaataattcggctggtaggccaaggtgtaccgataacgtgcgctcattaacggtcgtcagtttgtctgtaccatcttctgcatacgtagtcggtgatgtgtcattgaatactcgaaaaaaagtgcggcgcttgctcaatgctactgttctaaacacgtccgaatatatatacgctcgaaaggcgagagattcgactgttgctgttttcccaaagtcgaattcaagatgatccgggcccagaagttcgcgaaggaactcttgcgctgtcagcaagagaaaataggctggagtggtaccatgtcgatcaatctgagatcagtgagaagagaaaggatgataattatcaacacaagtatcacaagcattgagtacggcaggaagaactgctgtagctacctgagcaagtcgaagatcaaggacggcacctagtcggttcttgagaccatacgctttgtcttcaagtagaaggacagtttgctgataatatcgtccggccttgtcatgccattcttcccacctgaagaacaaaaaggacgagaagcttagggaagcaacgatgtgtatcaaagagcttcagtacagaggatagcttacgcagggttgcgctcctttgcaagcaacatcgaataatgtgatgaacaccatgccgctagagagtgcccacagatacagtgcgcatggagtttagatacatgttgtgagtcgataagatgaaagaaagcataacacatacaaattgcgccgcgattcacgtcgctgtgtgcagtcagcatcgagtcaaacatgtacttcttgacgatagttctcgccggtataggaattgaactaaagtaagattcattaagcgagttataaaaagtccaccactcattggcgaactctctcatctctatcaatgtactcgcacccagtctgtcctcggaagaatgtgttgataagtcatcctggcctgagtgctcgggttgaacagcggagaacccagcaacatcggatctgatttgttgaggggatgcagcgtgcctcgatataaagggcgcagcattaacagaagagaaaacatccatagagtagaattgtcggtccttttgttctccgctatccgatggattggagggttccttcgatcccgtcgttgacgttgtatttggattaggatatctctcattctggtatatctgctgtatctccgcctcacttcttggagaaagtagcaaagatggcaaggcttccatccttgacgaactggcgtcgattgtaccaagcagttcggggagcgagaggtcagactcgaagccagttgggaacaggaaagacggcagtggggagaaatcaatcaaaggatagttggataatgaatcagattgcagcgaagagacagagaaggaattattgtgatttccctggtcgtatgaagaggattgaagtgacggtagtgacgaaagaggatagacagttgaagattcgagcgtcgaagggagctttgatgagccggccgttggttgctcaggcggattttgatccgagagttgttgcgatgaaacagggcgtagagacgattcgtctagtaggtttggagtcgctggcctatccagctcacgacggctacgtgatggcctggttgattctttcacgcatgtgtatttgccgacccgacatcgtgtgcagattccggctctatcccactgttcatcacatttctttttgcgcactgtgatgatgataaaattagcagaatcatttaaattgtcaaaaccttcacttgattcaaagcgcgaatggagttgagactcatttgcaagtgtcgcagcctatataatacgaatcaaccgtcaaccacatgtgtaatatttgaacaaagccattctgatattcgtttgattgaccaacctgttctcgaccgtgaaggtgtttgaccgctcatctttgtgctgctgactgttgttgtcgtttctgtaagtagaagcgactcgaccgagttattcaaactagtcaatgtgatcatggttgagggtatggatgtatcggtgacgatgatgtttgatcaccccgcatcttggtcgactttctatagccgcggctaattgtatccatatcttttcggacattttgctttgatcccgacgaactagggtgaacggtcaaggttgagccaatcttacatcttagtcctcaccgtcagtcgtgtttgcacctaatgctctctatttcgtgttatgttatttcctttatcgagcgtcactatggggaacaatctcgtgaatgtagagattatacaaagtgtttgcaaaagggtcttacataatcaaacggtatcgaaacttgcatgtactggttcaggcctcaaaccatcattttcgtccagcgatgcccacctcttacgttatacatcattcgccttttactaacgatgtcacggagtgcgcaccaaatgctgagacttctagaatttctttccactctactttgagtataaaacttttgctgttttttcctttgtctgccacgttttcgagaaagtacgtgcagtcagaaacagttcgtcttctgacataccactcggttctgtgcaatgaggtatatatattcattgaacgaatattcgatcatagatggatgcaaacatatgctgtgttctttatcacctaagaaacgatacactgaaattgattgaaattgtatctctcattcggtctttgtgtttgacttccgtactgtcgcgttatgaccaagctttactgagaatcatgacaatagacacaacagaccgccctgattctgaatagaataacggcggatggaacgtggcttgactgctgctgaagcgtctgatacagtacgaaagtacaggatctgaaattgaaaagaatagttggcgatgaggacacaactcttattctgttttccctgactccaatgaggtcaagtgagtagaatgactcttttcctctacaggatgaaagagttcgagacgagtagaatttttttttgtcaggcagtgctccttaggctggccgtttgaggaggacgatcttgggaggctcctgaagtgcttcgtttcgacttctgtgatctctgccccttgctcttcctccgcctctgcctctacctctaccttcgcccccaccatcaaacccacagcctcctcttcctcctccacctctaccgttgccaccaccgaacccagatctactgataagagaaggtgcaatccaaaatgtctcgaccccgtatttttccgcagccggccccacatcttcacccgatgcacggactgtatgatcatacttgtccgattcgaatcctccgtcttcgtccgtgcctagtgattcgcccgcaagaggagatgaaatgagcagaataggttttgaagatgacgacgatggtattgatgatgatgatgcaattgatgaagaagccggaggttgagccaagtaaagaacagtgcctatgatagaccgaagccaattgtccatgggcggagtatcatccgagcaagcgatatctggcacatcggttcgctcagaaggacgagcgacccgaagcccacgaaatgattgatgcgacggatttatggagttggagatggatagatgagtttctacgaatcgagtggcgatacgaacggcttgggggagggcagaggaaccttttttgagaaggtcgagtgtatgaaggactagagtttgataacagatgggccatcatgaatgataaggaaagaaagaaagataataaaccagtgtcacaagtcagatagggagacagagatattggggaacaccatattaagcaaatggcatgggcttaccctcagcaggaatgatgatttctctttctctgcgagccaaaattctctttacactgggcaaagcccaaataagcgcactcccatcaaccacaactggcccattaccaggaggcatggacattgtggatgaagctgtgaccgcaggcaaggggaaacctcgaatctgaggagaaacgctcgagcctggaatagaaaccgaggtagatgccgatacgcctttgggatttcgaaggaggatactgggagaaggaggaagctgtggtgacttggtgtatgatgtatctattatgcgagtcgttttcccaggcacaccgtcttcttgtctacctgacggtctggttgaatcacttccatgacgacttcctctccctcccctggtacctccaggaatgaggagaaggcctgctctatcagagccccttgttctcgagccactgtggcgatcctggaaacttggcggactagaataattagaacccacgtttatatcttgtatctgttgttgaagctcttcgacttgatgagcaagaaacgcggcagcgagcgctttgttaggctttggcaaagagggtgaatcggtccgcattgtttagtcctggagaaaaattgattcgtgtcgacagcgggatcagattaggacaagagacgcgatagcactagtgtgaaggatggaggaaggaaggcaagcgatgtgactggcagtgatcatgactcaagcagatgagagccacggaacgttgaagagctggatgatagtctacgagtgaaaaaaggaaagtcatccggatcgcttttcgttgaaatcgcagccgccagatgtcgtcagatgtgattacagcggttcgtgtatatttttgatcattttcttcagtttctcaatcgtcatttcttaaaatccaagtttcaaaaggcagcaggatcattgataaaagtacagtctaggaattacatacaagccctcgacgtgccggtcaaaaagaaaaagaaaaaaaggcagaaaaaaaagaggaaggtaaaaacccctttgaaaagaaagaaatgatacgggattgtcaagagacagattctagtttccgaaaccgtagagcgttcgaccctgtcgcttcaaagcgtagacgacatcgagagcggtgacagtctttcgcttggaatgctcagtgtaggtgacagaatctcggatgacatctggggaaaatgaggcaagatgagaaaaaagagcttggtcagcaagaccgtaccgaagatggtggtgaccaaagataagagtatgactcactctcgaggaacagcttgagaacacctcgggtctcctcgtaaataaggccggaaattcgcttgactccacctcgtcgcgcaagtcgtcggatggcaggcttggtgataccctggatattatctcgaaggatctttcggtgtcgcttggcaccaccctttccgagtccctgaaagagagaacgtgagacgtcagttgtatgaacatttcggcaggagtgggacaaaagagagatcttgaggagattacaaacctttcctccttttcctcgtccggacatgtttgtttgttaaagt

SEQ ID NO: 3212 - DNA, 4184 bp, Xanthophyllomyces dendrorhous
ctcttcgagagatccgacgataccagaagtcgaccgagctcctcatccgaaagctccccttccagcgactcgttcgagagatcgcccaggacttcaagactgatctccgattccagtcttcagccgttatggccctccaggaggcttccgaggcttaccttgtctctctctttgaggacaccaacttggctgctattcacgccaagcgagtgacgatccagcctaaggatctccagctcgctcgacgactccgaggagagcgagcataagcgtctgtccgtagagaggagaagtagtagtgtttcctggatcagttgccagttgtacaaccctgtaccaatatcgttatataatcaatttatccatccattctctgaaacatcacattaaaatgattgccgacaagataacagcaagttacacaaaagacacgtgagcgtacagcacgtgacattgctgatataagcgacgataagatcagacggccgatcgagatgaatgactgggcatagatcgtatcaacatcgtcgatcggccaaaattgggtgagatggccgaacaccttgatttttgttcggcgatcaaacttctcgttcttcgttcttgtttgcacttctcttccacctcttccaccctcgccgaatctaacttgacacataactctagtatctatactcgatgggaaaagaacaagatcaggataaacccacagctatcatcgtgggtgagtgtcaggccatcaccttttgaagcatatacccatcacttgattgatgggttttccatttgattcaaaccttgtttccgaatggttctcctagtttaatccgtatcagctaacattctcttgatcacttgttgcttttgcttactcgttactctttccgttcctacttgttaggatgtggtatcggtggaatcgccactgccgctcgtcttgctaaagaaggtttccaggtcacggtgttcgagaaggtatgcttcctcgctcactcatgaaatgtacctcacatcggtcaaatatggaatcgagatcgtacaaaactgatcgacccgctattcttattgtgtcccacctctttcttttccctctcatcattcgtccacatcgctaatacccgcttgtcaaccttagaacgactactccggaggtcgatgctctttaatcgagcgagatggttatgtcagttcctccgatcatcaggcaagagcatcgttcatttctccaatactaacccagcggccttttctctctctctccgtctcgaccctccgatttaacagcgattcgatcaggttagaatactctcttgcgctgtctctcaacacaatatcaaaagactgacctcaactttaatgcttggccttccaggggcccagtttgctgctcttgccagatctcttcaagcagacattcgaagatttgggagagaagatggaagattgggtcgatctcatcaagtgtatgtctagagcttgtatcttcagaatcgtcttggttgctcatcctcctctcatttccttttctttcaaaacaaatataaggtgaacccaactatgtttgccacttccacgatgtatgtaccctcgtaggctcgatatcattcctctttccaagaccactgacatcctacaaccattttcaccgttcaggaagagactttcactctttcaaccgacatggcgttgctcaagcgggaagtcgagcgttttgaaggcaaagatggatttgatcggttcttgtcgtttatccaagaagttcgtgaatgtttgtcatctcactcatgaccaagtggtggttctgactccatcgcattacggtctataggcccacagacattacgagcttgctgtcgttcacgtcctgcagaagaacttccctggcttcgcagcattcttacggctacagttcattggccaaatcctggctcttcaccccttcgaggtcagtgacatctgccaaacatattcgtttcacatggcctttttttgactatcgatagtgtgttgtcaatatcaccagtctatctggacaagagtttgtcgatatttcaagaccgacagattacgaagagtcttctcgtttgcagtgatgtacatgggtcaaagcccatacagtgcgcccggaacatattccttgctccaatacaccgaattgaccgagggcatctggtatccgagaggaggcttttggcagttcgtgctcatcctgatccttatgtttggttctttccgcttcagagaattaacaattactgacagaaaatcgtatcaacgcacgctttctccaatagggttcctaatactcttcttcagatcgtcaagcgcaacaatccctcagccaagttcaatttcaacgctccagtttcccaggttcttctctctcctgccaaggaccgagcgactggtgttcgacttgaatccggcgaggaacatcacgccgatgttgtgattgtcaatgctgacctcgtttacgcctccgagcacttgattcctgacgatgccagaaacaagattggccaactgggtgaagtcaagagaagttggtgggctgacttagttggtggaaagaagctcaagggaagttgcagtagtttgagcttctactggagcatggaccgaatcgtggacggtctgggcggacacagtgcgtagtccatcccgcgaaatcctctttcaaaatcgtaagtgcagaggctgaagtttatttttacactttatctagatatcttcttggccgaggacttcaagggatcattcgacacaatcttcgaggagttgggtctcccagccgatccttccttttacgtgaacgttccctcgcgaatcgatccttctgccgctcccgaaggcaaagatgctatcgtcattcttgtggtatgtgctattctctgtactttcgtttttcgcccgccatgatgtctcgattctcaaacatactatatcgaaccccccttagccgtgtggccatatcgacgcttcgaaccctcaagattacaacaagcttgttgctcgggcaaggaagtttgtgatccaaacgctttccgccaagcttggacttcccgactttgaaaaaatgattgtggcagagaaggttcacgatgctccctcttgggagaaagaatttaacctcaaggacggaagcatcttgggactggctcacaactttatgcaagttcttggtttcaggccgagcaccagacatcccaagtatgacaagttgttctttgtcggggcttcgactcatcccggaactggggttcccatcgtcttggctggagccaagttaactgccaaccaagttctcgaatcctttgaccgatccccagctccagatcccaatatgtcactctccgtaccatatggaaaacctctcaaatcaaatggaacgggtatcgattctcaggtccagctgaagttcatggatttggagagatgggtataccttttggtgttgttgattggggccgtgatcgctcgatccgttggtgttcttgctttctgaagcaagacaacgatcgtttcttagagttttttttagtctcttcctgtgttctctctatatacatactctgctcgtctgttctcttctcgagggttcctctttactttgtgtcagagtcatacccggtctctctcaacgtccgtttgagggctagacaattgttagtctcgaaatctccatcacctcaagtctgatgttcatcatcttttttattcgttgcaatatacatgactgttatggaccgccttctcgatcgtcaattgataagtcaaaaattatgtttgatttgataacaacatcaagcgtatatacttgatgagaaaaggaggaggagaggtgtctgaacgcatctaaacccgctcaatagtcggttcccctagaaaccacctctttgcacgtgggtcggagaaggatggtgtgctcgtactgagccgtcatggatctgtcgtggtcaatgaagaagagtacaagagtgagttgatgatcggatcggaggtttatgagatggatagaagaagaggagccgtgtctaccctttgatgtcggtcaacggcgggtagtccatcacgattccagtcgagaccagctcgttcaactacgtattggcaagagagagagacatgtaggaagataagagcgagaacaggggtcagaggaggtaaaatgaagcagaataaga

SEQ ID NO: 3213 - DNA, 13175 bp, Xanthophyllomyces dendrorhous
gaataagagaactgaaagtaagaagtgaaggaggacgcacgccgaggagatatccgctttcacctatccggtcgagataacgtctacagaacgggagcgagtcaaagttcttgttgattgtcttcagaagtgacttcgaggattcacgtctgagtgaacgatatgaaatttgtctcagttgaacctgttcgacgcaagaacgaagataagatagcagaaacattacctcagtccattggcgttgtaatctttggatcgggcgtagtgtgagcatacaccatcctcgatgactcggcctcgaccggtggaaccgaatgtttcaatagcaaagtctgatgtgccaaacgaagacacgtccccatattgatgacggtgaaaatcagataggaaaagtataaggggaagacgaaacagacaagtgcgtcttacattcgccctcttccatctttgtttcgtcgttgttcttgacgatcgggaccgatttgcctccgtgaatttcataagggttgatcgagtgcccattcaagttcgcaattgccttgactgatatagaaaagtagatatgtgaaagaactttgtcaagagtagatacaaagagacatggaaggcggcgcattcggaacaaatcaatactcaccttgcttcgtttctgttccgatgacgacctcataggattccataacctcctgaatagactctccaatatcacacaatctcacatctattccagcttctttgattccagtgttggtagcgtccttcacagccttcaacaactcgtcatacgtgggctcgaacgacatggtgaaagcagagtcgacgattcggccgttgacgtgaactccaaaatcgaccttcatgacgtcctctctacgaagaactggatatagagatcggaaacaactaattgaaaccctgcgctccaagtgggagaaacaaaacataaatcacataaatcactcacttgtcttgtctcctgcgtttggacctggagaaagcgttatgccatgaagagaagcgtatgagctgattatatcccgtttcgaaaaggttacgtcaaacaacgtactaaagtgggcagcgatctcgttcaagttaactccggtggggaaaccgattcctctatccaacccatgctcttccacgagcgccctagtaccagcctcgatattctctgcaatctccgtcaaagtcatccccggcttgatggttcggttcgcgtgagctcgaacaagtctgtgaacttcggctgctcgtcgaatatcctggtacgtctgagcaggatcagcctgaagagtcttctctagcgctcgaagttcagaggaggagtatcggtaggcattgctataaagatgatccggacacatggcgaaatagccatttagttgactgaattgggtagtagaactggcccccccccaaaaaaaaaagaacagaggaggacaaactcgttggtatactccattatctctccttccggatagataccatcggtatagatcttgctcaaaccaactctaggtggatcagattggacctgaggacctccgttggctgccttggaagccgcagacttcttcttcttgggcttctttttcttcttcttcttggtggcttctccgttgagaggagtagccgagatggcctcatcgtcttccgaaccggacgagtttgggtcatctttggtgatcacttgttcatctatggcggcagaagccaaagcagactggatagtctcaacgtcggcagtcatgatgtggctctgagtgaagaggtgtaggatggtgaactgtctacgttttccatgcggattcgaatgatatgaatttgagaattctgctgactaagccaagctgccaaatgtggtccgcatcatcatcattatcatcaatcgcattcgcacatcgtatccgctggtgtaggatcatagaccggacatcaagacatttgtatgaaagtatctacagagacacgctcagaccaagacttcgcccactggtttccaggcttctggctcaatccccttcgtaacacagatgctcactctgtcgaaggagaccgtttctatcagtgtctcactctgttccgcttcggaatctcccaagatgctgggtgagctgacgagagctattcctccacaaggcatcgagcgcactcttttggatcggtaaagctcgtccacaatgatctggcggtcttcgagagagatgtcggagtacaacagcgaaatatgaggaaagtacaccggccgttcggatggtgaaggcaggaacttgagcgttagatcgtggaaaagcataagatcaggatgctctgtattgtatgacaccccatgaagaatgacagtcacagtttagatgaacatccgttgaacaaacacttcaggctgacacgaaccttccaaagcaaccaacacacatcgaaaatactcttcgcctctccgtacatccttgaaccttactgtcagttcattcttgtgcctatccttgattgagtttctccactctgccaacgcatcttcgactcccttcatgacatcttcgagggatgttccgtgtggtgcggatccgaggagtgtagcatgtgccggaaaccgagggccaggaagagagctgatcagagttcggaaggtatcagaagcaagagatttcgaaggcgtcagccagagggagtatgaaggttctttcgtcatatcaattgcagcggagatagtttttgatgtcgtcgactttgacgtactggctagctggcagtagatgttgctacaggtgatgttgttagacgtggttagggttgcgggacggttccgagtttatttccttctcactcatggtgccatcattctccataagcaaacattcatcatcaagtgttctgacttgggtttgtcgttcgtttgtacaatacataactcggtctgatgtgctccattacacaggatggtcaggtttgggatctatcctcactctcaaacgaaaagtaggcctgaactcatcgattagatcaaacacgtatcatctctgatcgtaaagctcaccattttctgtggctttctctttccatacgcctcagttttgattacaacttgacaacctcgagcggaacaaactttttgttgaacgtttgtagaccgttagttgccgagttatggagagttttcgatccggataacacgatggccgtcatcagaacttctcaaggtgataggtctattgggttcgtgtaggatgtttgctcatgtgttcagttcacgttctcttccttcgagggaaacatgtttactcatcatacactgtcatcatatagcgcgctcaatcgaaattttactcttgcaccaaccttgccacccacgccgctattgactctaacttcaggcgctccgtgcccttcagcacctgatacattgatctcaacattgatccattttgtctgcgccgctaccgatcaagccaactctcaatcaaacaaaccggtcttgataggtgctcttccggtgggagctaaggaggaagaatcatgtagctacgtcttcgagtggaagacaagtcatgcttgctcaagctcggccggcgcatcgggagtactaggtgatttcggagcgatcgccgtctttttcgtactgttagtcctctgcctgctcgattggtgatctattatattttgtatcgattgagaatacaatcaactgatgaaacatgttttctttgttcagcgcaattaccgtcgtcctggcgtacttattcggcaccttcctatacaatcgatttattcttcaacttcgcggtctcgatcagcttccttctcttccgtctcttccaaaaatctcgaatccatttaaaagacaagggagctcgggatccgggtctggacgaagtctttggggctcttggagatcgagtcatagaggggatggtgttgggggatactacggaaacttggccactcatgaaagaggtgatgatgaagaagaggggctcgtgggtagattcgggcttgatagtagcgacgaagaagacgatgggttcgtttacgactttcattttctttcataatcttctcgacataccctatcgctttcacggctcgcagaacgatcagcttactaattcatattttgacaatgtatctacagtgacgcacctgccttgtctagtgattcgagggtgtggaggactccagtaataaactcaaacccttcccaggcttctgatggtcgattggtcaacttgtagtgcatcttttcctccgtaatcaaaatagaggcactctgttcccgaaagagttgctcgtggtgttcttcgataaggaagacgtatgcatacaatgttctcagaaagacaaatgttgatcagttgattttttatgtcccaagctatccgatccagtaggtatatgtataatgattggaagttatgatggattagagatgctctgaagatgcgttacagataaaaccatacaattaaacagatatacactgacaggaacgagttcagtttggtcagaacgtatgctacagaaaatgatgtgttggaatgaatctgttctaaagggcaaaccacataaagctctttggttcccctatctagattacgtctccaatgaagatacccaaagcagaggtcgcattcttctggtcctcaagtgcacaggctttgacaaagtcaccatactgatccttccttccttgaatataggtgataaactcgtcggtaggacaagtcgatccaggaccggactgacaatcaggaataggaatcggagcctggttgactcgactgaattcaatgcaacagtttggccatcagctacaatgagtccggttcaacaaaaacgtaagaaaatatgatcacgcacactcggatgtaagaagttccattcaacggacagctcaggaactcaagcccgacgttacccaaaaaaggcagaatctccgaggttttccaagctcggtctctatcaatcgactcggtgctcatcgtgttgttgatgtctccagcaatagtcagatttccggcaataccaacagagttgttgaagatacctaacgcggtggccaggaaggcgggctcttctctgtgggtgaacgaaaggaaaagcttttgctgggaggcgatgtcaatagtcgtgttggtagtcgatgtattggatggagcgagaggtgaggatagcgtgatgttgaggagctggtcaacagaggctagtacccaaggaagtcctagggaaggagactcgggataaccgtaacccaaagaataatggtactttaagctgagacgacaattctgatcagcgggctatcgataaaataaccttgcatggtggaaaccaaacgatatagaaatgaacactcactcattagcgtattcaaatccgagccagtcctcattggtgaaagcatcggtggtgcagaacggagaggtatcgtttccgataacggtatcataacctatacgtgcgcagaggttgagtcagacaaccttttagacacgcaagacaaacaaagacttaccgcaaagctgctgcatcgcgtacacgtcgtcaacagtaaaattgaaagcaggtatctcggcgttcagtcgttgaacaatcggcgaggcgtacttgttcaaccaagtggtcgactcgttcgtttcagatgtagcatcataagtctcgcaggaatcctaccggtaacgaaaggggcataactcttctcaatcgttgcatttcacaggaggtcactctgaaactatgggactcacatgaggagtcaaagtttgtgcggcctgtagctcgccttcggctacagtcacgacctcaatcaaggaagtgtcattgacgaagccagagataaaagctcgagtcgtgtcttcgtctcgatcggcagaggcagtccagacctaagccgagcacacatcatggcgtgagaacaatagtttctatcgctttgattgaagaacatatatgaacaaaccttgaacgcggtcaagttgtcggtcggaaccaggtggggaatatacgacgagaacatacggcccaaatcagccgcgtcgctctgtttgaaggtagaattcaaaggtcagaatacgctaaggaagtctgaacagtgatgtctatactcacaagaccgatgggggtaacctcggaaacttgggaggttgcatttgtaatgtttagcaaaggcacgtaatcggagaggagggatagagatgtattggcgaagtctgctctggccgtgaagttgagaagcttcgataggaaaggctcgagataatattcgtagtcataactgtatgaaagatgagagcgataacttcagtatacattgtagaaactgatactccaagctaccgagctcactcgttggcataactgtaagacagagaaggaacaacgagtgaagcatggcatcagaagaggctgggtatgttatatgactcgctcaacgaagactcacatatcggtgtgtcggaacagatacgaagcactctcaatcatgcaaccctcgggaggggaggggtttagctcgactcctggagactgtgaatagaatgaataagcttctgcgctatggaaacggcgactgtatcggtgaaagatagcgtacgatgaaatatggagcgattccagccagatgatgaagaggataaaactctggatcacttgcgttctgggtattgtgaaagaacgtggaaatttctggtctacgagcaattggtagtccccgaaggttgggagtagggcctccaagcgcaaaagagctgaatgatgatagaacggcaagcaggacgatacaagacgacatgaccttgagctagtacaaagtagaatctttttcctcttaagatggatgtttgaataaagaaaagacttttcgactgatcaagttgaaaccttttacggagagagaaaaagacttgagggtaaaacggcttaagcgacgtcccgagtgacgtcacttgaagcctcacggctcggaaggttttaccttgccgtggatattctccggcatttctggcgttgttacagagctttctttttatagtggccttctcttccttatatcattgatcatgttgtctgcaagacggtggctatgtttcaggtcaaattctagtatcatcatctactctcagtctacaggcaacaacctaggtttcccatccgacacaaaagccagacttcccaaccgttcgttcttgcgctcttccatccctgcagcgaatgcagactttttttttttaaaagaaagaaaaaaaaagccatgtatgatcagatgcaagattagagaatatttatccgttcaatatctcaaagttgaaatactcacaggaacaagaattccacagcagtccccaaacccttcggccttgatatctcctaccgtcctcacatgcttgtgatcaccatggtcaaccacatccccctcggtaacatcatccattccctcaggcataggtaaaagagagccaaacagaaagtgctgcatgacaggtaatcgaccgagtacctcagcagtgaacattttgatcatcccttcgttcacctttgaccaggtcttgacggcggagatatcgtcaagcatgggcgaatgccaccgaagagtcgcagttttgatctaaggacagaagaaagagcaagttcgaacatttgtcgttgtctccgtcacaaaacgatgcaatctgaataagacatacagagttgataaactggatacatgcaagatacatataatccggagagaactgctccaaaatctcgggatcatgaattgacttgggtcgtagatatttgtgtgctgaatggttgaacgaatcgttcttgattcatctttcgggacgatatgttatactaacccagagaaaggagctgaaagacagacattacctttcaattgtcctgcgccccataagaatggcaggaagtgatagctgttttgattcagaaccagattgagcaggaagtcgttactatctttgttgctgctttataaactcaaataaatcgtataaaaggaattactcgtccaaaccccaaactccgtgcgaccctgctggctcaagccagtaagatttctggagatgtcgcatagtttgagtgtatctgttgatcgaaatgggaagaaagggtttgaacatgaagaacaatgggaggtgacctaagccaatatcaagcagagaatggcacgtacctccaaaagacccgaatgacgagagctctcgaatcttcaacgaagaaaacgttcaattttcgaagacataacctatccaagaagaagtaatcagcaaatttcagggacaggaaaacagtaaaggaacaaacagccagcaaacaaagtttagttccatcccacttccgtaatcgacccttgttcggtttccccaactttcgttgaaatatccagcaagctcagggatagccttcgacggtacgtttggtagagttgaaataagatcggccgagttcttgttggcgttaatgagaaaagaaaagtcagctatcgattatcggtataagtgatggtatgtttgctcgaacttgttgaatcttgtcgtaaaagtctcgaaaggccgggtttccaaatctagacattttgttgtccaccggtggagtggatcgtgctaatgattcaacttgatcaagtatgaggagagcagcctccaccgcctgcgatacgtcgcaaagaaacagtctgaaaatgtcagaaatccatcacagagcttgaagaacaagagaaaaaggaaaaaaagggttgtttaagcaaggaaaagaggacgaacaggtgaacaaggaattggctcagtcagtttcacaccgactattgcatcgttgagattctggatgaattcgagaagatcagaatgaacagtcgattgaccgaacttttctagatgggactgagtgacaatatatttctggggagcaatgaataccatgctgatgatgatagtgatgatagtgtttgataaaaaagcgaagtgtgatggaggttgaagagtaaaagagaaatagtgtttatcttatctggcgaaggatcccaaattcgagttcacctagagaccacaacatccatggtccatctgtcctcttcctccttgccagtatctctggctatcgaactccagaaagattggccatatcgaacacagctcattcttcagcctgtcggtcactcccctctcagtcagctcagagacgctttgtttagcttgcctgatgtcgaagaacgtcggttcaactccgttttcttcgcagccctcctcactctggcccaaaccaagatttcatccgttccctacagtcaagttacactctcttctaggtgtttctatacagaggtgataatagtatggactatccatgaccttctgtattcttcgggcaaacccacagatgacgagcactgggagactgctgtggctaggctcgacatgacacttattgttgctggcgcacccaatcgagaggagactattcatactcttatcgagtttatccaaaggaattatcttcctccatctgttaggacgtcatctttacctgctgagcctcgaaacaaacggacgaagtttacgcacgattctccttcggaagaacatcagctcctactagcgcccaatccaatcttgtccttcgatcacgctccttcactttcggcctatctgaacaaatattctcaaacaccgttcatcgtccgttctcatttgattgaaacaggttggcctgctatatgcgaacaagattcaacctggaaggataaaacttatctggttaaagcagtcggtagaggcagaattgtcccagttgagataggaggggagtatacgagcgaagggtggggacaagggatggtcccttttgagcagtttttggatcgggtaggatggggcagttgtgctgcctggtccgagagatatgaaagcgatcaagaagcatcgaaggaaccagctctatacttggctcagcattctctgctcaaccaattcccagttcttagaaaagatattcttttgccagattatgtcttttctggaccggaggaagacgttccaaaaggatacaagcctccctcaaacgaagaggcgctagtaattaatgtctgggttggagggaatggaaggtctagtccatcgcatacggttagtctctgctccctacttccagatgcagctgatctgaagaccgctcatttctccgagttgattttgttttatacgggctttgaataggatccattctacaattgttatggttggtcgattctttatcgatatcttattaatcaacaaggatgcataatgacatgattgaatcaccaattttctgttgatagcgcaagttgtcggccagaaacgaatatttcttactcctcctactcaatcagacgccatgtaccctttctcctcatctacgtcgtctgctttgtcggactcttcttcgaccgaatccacatcgttcacagctcatctactatccaacacctctcaagtacctatcttcacaccggataatcgacctccagatcgagatacttatccaaaattctattcggacgcgctgggatgcagcttggaaggtgtgctgaatgagggtgatatgctagtcatgccgttcgtccttaagtcactctaaacaattttcttctgcagatatacacaccaaagctaacaaatctttgataccaaactccctgtccttttcttctgttcaagccctgggtggtggcatgcaatgagacaggaaggaagaggatggggagtctctttttggtattgaaaaattaaaattcataaaacgtgtacgaacatgttgtcggagtcgatgcggtctctgtattcaaaaagaaaaaaaagaaaaaacgtgtcaagcaaaaagagtaagaaagaagacgaaaggctgaaacatccatgaataaagacacaagaccgataggatttcaaggataatttatccgatgagaaaattcaccatggtacacagacggaagtgagggtgtggaaaacgcgacaagatacgataggaatacacttgacaagaaagaatgtataggcagaatgcccgcaagaaaaagaatagctatacgatgttttggttggaacagtcctacatagagaaaagaatcaacgaacgccaagaaagttcttgtgtaaaccgctcatagctagagactgagggagaatgtatattgatcggatgttgcgaaaaacaggtttcgtgacggatccaagaagcataagacttagacgcgacgggtagagaagagtaattgaatgagtgttgtacagatggattattgaatacatgaaggaaaaaatgaccagccttgtggaacaaggtagaaaactactactaaatggaccaaatgaaagaagggtcttaatcaacgtgccaaagtctctgttgctactgacagatcctgaggaccaaatcttcgtatagcatatccgtctcctgcccctgtctcgaaacttcgtacaagatcggcgatctcgggatgactggcgcttcttgatcttgttttcggtggagtgggaggcaactgattgatcgtcgcgtgagaagtggtcaacctgttcagagttttgctgggagaagatgagagactgaaaggtaatctcgatcttcggctcagaggtgaaagaacaaccgaagaggaggacgagggttgacttgagaatggctccgaaggtgatgagatagtgggaaggtaggacgtggttgagaacctgagcaaaccggaagggcgaatgggcttggagatggacgaggacgaaagtatggaagaaacagcttgtttttcagccggcgagctaaaagaggcgctggcctgacgggaccgaggcaagctttcacaggggtcagcaatttgcaagctttcgtccttgatctcatgtccttccaaaggagtatgaagctcgccatcatcaacagtaatgtcactctgagccgtcgaatttgttcgttgaggggttacccgctcggtgaatatagtcgtgaagacatcgggaagactagtcgtttcagagctgaatttatctttgggcgtctcgttctgcatcttggcgtcattttctccatcggacgattccatatagttggtctcttccggtagagggacttcctgacggtcagtattgacaagcttcgattgggatgtagacaattcgctgtcgagaagatttggtctatcgttccgttctgatgaagaggatcgcgagaattgattgggaagcgcagggagaaagtttaaaacaaagtcgcgctgggactcgaacgcgattttggtactgtttgtggtcaaatattgaaaaaagaatcacagaccaacatatcgattgagaatcacaatacaaaaaggaacagtaccaggaagaaaaatcactcacgcctcgaggaaaggaaacgtttggaatacatggacgcaatcctcaaagacctcatgtctcaccactgtaccgctcaaggtagccttgtgcgctaacaaagtgatctcgtcccttagaacttcggcttcaccagattgaatgagcaaaggagggagtcctttgaaatcaccgaagagaggagatgcgctgttgagtgtaaagtcaatttgtaaaatgagaacatcttagttacggccaagcaaagggtgtgatggacttcagaacctactaaggatgagtgaggtattttttcaccccttcttcacccagatagcagtataccggattcaagtgatcatcgagcccaggtctgggaacaatatcgaaaggagctgcgcgaaacataaaggatacatgtcggtcatgaacaggcggcatagaggaaaatcttccgcaaaatactgaccatttgaatcccatgaatcgcacgacatggtcaaatccacccaaggagacatcaatatagctcccgatggaagcggatatcctgagtagagagaatcgtgatagaagccgagaggttcaggctgtgtatgaggtcaaagaaagtcatgcaacagaaagggacaaacaacttaccattgtctctcaagtacagtaacgtacccagtaccaaccctccaccggcagagtcaccggcgaaaagaatattttccggctttacaccgagctcgtctgtgagtctgaaatatgcgctaacggcgtcgtgtaggggacccggaaaccgagtttccggagcaagtcggtagttaattgcgtacactctgg

SEQ ID NO: 3214 - DNA, 11851 bp, Xanthophyllomyces dendrorhous
  misc_feature (8003)..(8012): n is a, c, g, or t
tgcgtacactctggcctgacattgagacgagatctgtgtggtgatagatcgatgggttgccgctgagaatacgtagtaggcaccttaacggatgatacgacagcgaatgaacgatcaacaccaaaaaaaaaacgagaaagaaagaaaccaaaaaacaagcaaggaagtgtttagatcaaggagattaagaggatatcatggggtttgtaatcaggcttctgagcatgtatcaaacaaaccaaacatacctccgtgcagatagagcacaatgcgctctccaccctttccgccttttctcctctctttccactctctttgccattttgcccagagtaccttgtcgacgacccattcacctccaacttctcttccgctgccgaaaccaccctcgattgaataagggtcatagttttcacctcccagttcgtaagaatcgaagtcggctaagagacctctcaatccgcgagactttacacggaacgaaaacggagtgacaatggcagaagaaggaagaggggctaaagtagacagcgagacgaggccacgaataaacggctgaggtcgagatcggcggttgttccacatcccaggttgcggtgaagaaggtaaagatataagtcataacaaacgggggtcagactaaacttgagatttcatgcaaagtgaatggttgattagggaaaaatctttcacggactatgtctgccagatgagaatgtgcaccaacatcccgcatcatggatgtgatgatagtcatcctttttcgaggagcaacaaaggtacaataaattcaggcaaggttaatgaaggactaggctagacaaacgaggaagaattgacgatgaagatacatggcatgaaagaagacctttaagataagccggggtaaaaagccttactctaatccccaagatttcttacgaggtccatatatggtatgggttgcgagttcggttgccagatgactagctatggccgtcaatatttgtcacaagaaggatcagaacatagcctctaggattttaccaggagaaagatttcaaaatacatggacacatggccatgcaatcgttggaatctttatcttgcagagtgcaagggctgataaataaacatgtgacttacctttggcgacgacgaaaccagcgagcttgaagacctcacccacaccccagccggtgaggaagcgcttgccttgcctttgtaccagactattatctattctagcagatgctggtgtgtctggagacgagtagtgagccaacctttggtacaggtcggaaggaaggtcggctgttgagccgacgggagttgccgacgacgtgctagacggcgtggcagaattcgccggcggtttgcgaaagaaccaacccatgctggggaaacgagaaatacccagaagagaaccgacgagcgtggggagaggagaacgagattcaggtgaccgagagaagcagagcgaacaagcgagtatgagtgtatataagaaaaggttggatgaccgaaacggcaagaagcggctgaataagagaaggtgtgttgagaagaggattgagggtgaaactcgagaccgattacgtcgtgttgttattgtaacccatccagccgaaccggccagatagccgggggttcacacaggttcacacaggttcacaagggttcatctgggttcaggcaggttcgatgtcgaaatagagtcatacacagccacatgatgtaatcaaagttacgctatccttacacttcacgcccctccatcaatcctctctcatcgtttgccggggttcgctcgttctctccatccttttctttttgctccttctcagatcgtccgccatcccatcttctcctttcgctcgtccgtcttgactcgtactcttgatcttacagtccaatatcgagagcgttgttgtacgtgttgtgcgcgtgccagtgtcggttgtttcttttttcttcttttcctcttcgggcgctctgttttccttgcgccttctgtaaactctacaacatcaccatcaggtttccattatgagcacgaacaaggtctgtccgctcttttgtacacatggctgacctgatcagatctctttcctagttcttagcctggatcattcctacgagacctatcaagcatctgatcactttctgttctctcaccttgtccttcatccgggccgacataggctacgttcctcagagaatataaactcgtcgtcgtcggtggaggaggtatgtctgtcatcctgtctcgcatcattgcatcggtcaccatcttaccaattaatttccgtcttttgtgtgctggatggtcatctcatgattcgctcgattacggaacgtgctgtactcgccctaggtgtgggaaagtcggccctcagtcagtcctgatgtcttcatttcgcaattcttgcacgcgtcaggataactttacttcaagcctgaacgtttctcatactttccgctcttccttctcctcatcaattaatttgtgtatctgtgacgtcgtgtcaactacatgcccgtcgtatcaatctccctcgcctggaccacggtcgatgctttgaccggacatatcttcctgcgtgatcgtgaacatgttcttcaaatatcatgcgacccatctcttatgttacaacgtccagccattcaattcatccagtcgcatttcgttgacgagtatgatcccacaatcgaagactcatatcgtaaacaaacaacgattgatgacgagattgcattactcgacgtgttagataccgccggtcaagaagagtatgggtacgtggttgattgttctcaatttaatcctttgaggggaagaagttccagtcaattcttgactgtatgctcgaggaattcgtcccgtacttctcaagcttgtataagaccacaagtctttgccactcaaagaacactgcgtgtcaactttctggacatatggcgctctatctgacgttgatgctcatgttttctgattctcactccgattcaaattctatatgtttgtcacagtgctatgcgtgaacagtacgtatttgtgcaatattgtatatcttccttgcggttatcgatctaatggaatatgatttttgggccaatggtcttctctttcacactctgaccagatatatgcggacaggcgaagggttcatgttggtttactccatcacttccagaaactcatttgaagagatctctcagttccacgctcagatactcagagtaaaggataaagatgtgagttgtaataatttgtagtttctcggagttgggttttcttccgcaaatgtgctcataaataccctgtctatggaacgccaccgctctaaggatgtgccttgtgtgattgtggctaacaagagtgacctggaatacgagagacaagtcgatgctcaaggttgttacatttcaaaccatagtctagcccctttggttgtgtcgtatgctaaatacgacgattacccctcacctcatctgcgccattcttcaatcagagggacggcgtcttgcccagcaattgcgaacgatttgcatcgagacctcggctaagcagcgtgtgaacgttgatgaggctttcctggagctcgttcgaagcatccgaaagcacaacaaggtctgtcttccagcatttatgagccggctatttaggatgatgtaattgactgttgtcatgactttccttgcaatcaccttcgtctagccggtagaaacgggccgcaagacagatcccgccgctgcgtcgtcgtccaaagccaggtccaaatcatcgggcggaaaagattcccatagtagtggatgctgcgttatcttatagatacctcttcttccctctttcatatccaatcttttgatttcttattctacctgtctgtagctctcacatacttgtccatacctgttttcttttgcctctcggttgcctttcggaaacatcccttctcatttttcatctcgttagtgacgtctatctctcattctctctatcgtccttgtcgaattcgttttgatcgtcaactctcctttggttctgccatcagacctgttgccgttctgaatcattagaagggactagttttcctcttgcttctgcaaatctaatcctttttctaactttttgctctgctcctgtgttattttttccctctttccctccgtcaaactcacccaatccagaattcaaaaaatacaaccacctccgttaatgatctgttcctagtttgctaagggttaatacgtccgacgatgccatgtttattcttccttattcgaaaaatgtttttccattgaccctcaatttgtgcttggtttgctacgtgtatctgttggctggatgcaatctatcggctggtctttgccggttgtttaatcgagagatgcgtggtccggatgtgatgaagaaaaagaagagagttgtaaagatagaagacagtagagtctaatttaatctgaagccgtggtgaggagaaaagattgacgatggactcgggtgatttgtcaacgtcaatcagtcgctatcacttccagatcccgttcctacagaaaagaaagaataagaaatcatgttagtctagtcaggacggtatgcaagagataccccggtccagagaatagttacctggtccatcgtcctcttctgcgagatcgccagaatcaaacatatcaatgcctccttcctcccctcgtgcctcgtcctcctcctgttgttctttcatgatctctatgatctccacgtcggacggtcgggaaggtgacagtagatcaactggaagctgcctatatttattcggtatctgcgtagaagatccggcttcaagaagcgagcgcacttaggagaaccgagatggtgaagtagagggtgactgtaagtgcttggaactgaatacggaagcagtggatgaggacaaaccaagatatattctcagttcttgatcttgaacttgcatagcgagatgaatgggagtcaagccctccaatcttgtctgcagatcgacatcgcaatcatcttcttccagaatgtgatccaagctacatatcgtcagggccgagtagaacacagtaggtgagaagtaaaaataagatgtgctcgggctttagaaaagatccaaagagttgaaagagcgtgatctggccttaccagtcagttgatcctcgttgaacagcgtagtgaagagcagtaaagcctagactaagagtgagtgtttatgatcatgtttatctttgtcagatgaaatttcatctccaaaacttctatcctgatgatgcggaaatgaataatggacactgacccatcttgatgattgatgtcaaaacggcccgtcagagacaagacggatactgatcatttgtgattacaacagaaaattcagggatagggaccccaatcgtaagttgatgagaaatacaaggcgactctcgttgagacaatgaaaggaactgacacaaaagttcttcattatccgtcttggctgcattgagaagctgctcatctggtaatacagatagtccgtatcagcatgttttgaggtaagggtttcgcaggaagcgatcactgaaagaaagaaaacttcgacacttcataagtgatagactcactgggtgatgcaccttggtcctgcatgagtgagatcataagagagttagactggagatgaaatctgaaagcctcaattgcgatgtctgatgagtgcccaagatgatcagaatgattgttaaagtgggcgtatcgttttgttgtactcacagccgcagttggccgacgacattcccaagccgcctgcttctgactgtaatatatttaccaagatacgatgacgaaaaggaactcttcgttctggcactcgttcccagtcatctcctcactggtttctcaaatttgtttccaacaaccatgtacacactacccagctgtctcagccaaatgcatcgagaaaccaggaaaacagaggagagccagctagaaagtctatagctcattggagagaaacccttggaactcggcgcagaaacaagtagaaaaaagaatctgtggctttggctactagagagtaacctcagccgatggtggtcgatacgtgacttttctggacttgggtgccctcagtccacagaccaccaaatccccgttggtcatgggtctggtttgccttcttgatgagctagtgttagcttcagtgacaacctcaacatgatcctcaacattcaaagcagcagctgtgtcgtcaaacaccaatactctcgacccctcgttgtccacctggtgcagggttaggtggagtatgtagcgggatgcatcgacactcatatttcaccaagtctgagagcaagcagagaaagaatgagaactcgacattttgtcctaaaacagagacgaacatgaaaggaaatcatcagaaaaagagacaaatgaacagaaagactaatagacaaggaggtagtagagtaaagaaggatcttcttcataaggatcacaagtttgtctctttgtttctctcggtctctggtttttctcatccttctacttatccagttctctatctctttgtctgtgagctgcgcagccttcaccaggtcgttcatcataacccaaagccagtcgaaccgatcaagagggattcgttgcgaacaaacaggcaccaagcttaacagctggtagagacaaaaaaatgtcggaggcaatgaggacaatcgtccgccttgaacactcatcagcggtgctggtaattatcactgctgcttctgctgctcttacagctgctgccgccctgttgacaggaaccagactacatctatgactcatgggagttttgattgtctaaggtctcgagatacccaagttcgatatagctatgtatcgaccactgtcagttgaggtcacttacttgtggccaaagccatacgatatatgtttgtaaatgtacagtgtaccaccctgcgatggacaaaacgagcgcattgactttatcgaactgtaagcgtatcacagaactcacgcgaacatatcatcgttgttgttgttagtcaccggttagtaaccaaagtacactccttgtactgttccttcctaccaattcattttcgatactttgacctccactccgttcattctttcattccgttctcttcaagcttcttttactcttttgttgtaatgaggttttcttcgattttttcaggagcgctcattagcttcgtcgctgcgagcttcggtttagcctctacactctcggatggctcagtgacagcgaccgcgctagaccccaatcttacaagagtacgatgaatatttgttgttttcattgatcgttcctaactatgtccatcttactgaatgttgttgcaactttctttgaattttttttggccatatagtcttttcatgggatagcttactccccatcaggtttgatttctcctgttcattcaaacatcgaattaacagtaaagttcttggcgccgagtccaaagctatgtattctattctcttgctaacacacctctgtggcttcctattttgttgtaaatgacatgtcaggtgtgattcttccaaattgtatgtcaacgttctcatttacttgtatacacaactatacagcatcattgacgacttctttgtctccataggtggtgctacccaggaagccgtcacgaatgatgttctcctgctcgctcagctgacccctcgaattcgtacatagtaagtcctactccatcccccttcctacctctcctttgcagctcgtacgcaactgatgcttggcgctattcctcttagcgcctccgactgcaaccagacgctctacatctttgaagccatccggcagacaaacgcagatctcatggtatggatcggcatctacctctccacaggtaccgatatcgataccgtctacgaacgccaatggactgcgatcgagtcagtcatcaatgagtacggaacaaaaaacatcggtggaatcaccgtcggaaacgagttcctcttgctctcttacggtgacggcactgcnnnnnnnnnnaactgatgccactggagtcgccgccagaactacgttgctgagctacgtgaccaaagccaaaggtatttttttttgtacgactcgacctatgctaggagcttagaaactccgacaaatgattaaacatctctcgttggcatatacagctgcattgagtgccctagacctgaatgtgacgatccctgtgggaacgtctgatgccgggtctgccgcaacgctggctctttgtgaaggcgtcgattactatcaggccaacgttcatccttggtacgctcattgctgcctttggtccgagctgtgggctttcccaacatctgcttaccctcgtctttgatcttctgtgtcgctgtgcaggtttggctcggttgactaccgtggtgctgcagcatggactttcaactttttcgagaagtttgatgtcgaagtttgcgctcccgcttctaacaatccgtgagtgtgctgtcatcgcgagcctctgaatcgaaaaggtagatgactgatcagccacacactcttcttcgtgttcgtcgactccagtactatgtacatcgcagagaccggatggccgacggttagttacgtcttttgacttatttcaccgctgtttgcctccatctgacatatcagtatgatcttgaatctttttgatatagtcttcggacaacgcttccgacgtcagtccttcactcattttgcttggtcagacacctgatcctctacgtttgtttggctgactatctgatctgtcgtcatcctggaatacaggcgaccaacggggcaggttcgcccgcttcgatcgttggacttcaaaccttcatggacgaattcaactgccaagctaacgcgaacaacaccgaatagttcgttggctatgttaactgtagaggcctgcatcccaatcatcacagtgccagcgatgctcatgcaccttgcttggcttccgctttttgttcagcttcttcttcgagttcaaggacgagacctggaaagagatctacggtggtgtcgaaccccactggggactcttctacccgtgcgttatccgttctactctgatggcccatatcccaaatgtccgaagtcagtttagctaaaaacgatggagacaacttggatttgaacaggaaccgaactctcaaggctatcaccgtccgttttgccgtcttcttttttgccatctcgtgcttgtgctcatgccgactcttgtttcgttcctggacatagatcccagagtgtgaagtgagctccccactgaatggaacggtcgctcagcttgtcttcccctcatctggatctacggcagctcagacctcgtctggagcgtctccctcgtcgaccagctccacagacgcaagctctgcctctaggagcggaactcagctgggtgcgggactgtctaccgtcttgagtctcagcatgggactggccacactccttctctgagcatgcgcaatcttccagcaacgcgggctcgatcgatccactcgttattctctactttattgcatttcactctcctttttcactaccactcgatctttctgcctatcatcgcgtttcatcttgccgagaacatacctctggacactatatcgaacacacggactcttttagagatacatttaccatccacatagctagctaccccatctcgtttggcgctctcgaacacgatttcaactgaatttgctcaacatagccttattccggtaaaatctttcaggactgtatggggttgtatctccagttgtttcgcacagttcgactgtcggatctggagggaagattttgacgatacgcactttgcttattatccacagccccgacagatatacttggcaaaaaagtgttttacacaatggctgtgccatccttttccaccaaaactttctgtggcgttgaacggcggccgtcgagcgaatgccaacttaccgcacttcaaggcggtgcaggggtcaaatgaattatattacaacatcgagctaggaacaccgctacctcatctccaatccgtaatgagccacttgagctttgactaatgagcggtactgacggcggccgtgagggcgcaacactaacatctttctgttgagcatcccttctctccgacttgcttaaaaatgaggtgtctagtagagagcatggaagaagcaacttaccttccctccgattctcattgacactcgctcgcaattcagctcacctcggcacatacttgaacaggaagaaacagatacctcaatctcgaagatgccctctcacaaggccgagatcaggctgattaacatcatccatgctatccaattcgttcttactgtcgctgtcctcgccatcggtctggtcaagatgtttatcatcaaaccgagaacatcaagctccagatggttgctcagtgtggtaagcattgactgatgttctattcttgataggacggactgtccagaagccgacactgatatccttatcgcttgtatatagtctgccaagtctctgatcacactggcatacatagtgttgagcgagaacgtgtcctacttccatcgatgggccagtttgaaggcaaacatgatactcaacatcttggaagccgtcttttggatcgccgccatcgttctaacaaccatgggattgatcaatggaggatgtgcggcaggagtcggctgtggaacaacatacgccgccattgccatcggatccttgcttgcgtgagcggtcttattatattcgaatgcatgcgattgtcgatcatcatgagctgacgatcatctctcaccttctaacagagctttggccctgccgatggcgtacctctctataaaacacttcatgaaccgaaacaagaatcagtatcaaatcaatgacgattcgagctctgatgggtcgaccccaatgataacgaagaactatggccatcaggttgtggtcaacccgacctatgcgaaccatccatcccgtgtttaaacatattttcccctgcctttcctcgctccactgagcctgcataaatactgctattcccttttggtctcgtttatagagatagatagttattcatgattttacgagcaaatagttcaacaagctaggacatcacccagattcagcactaaatttcatacagtcgcagatattgggtttgatgagctcaacctcaaccaacaacggtcgatacatggtccttcttggtcttaggtttccttggactagaatctaacaacggccagtgtctttagagtagcctatccttccaaattcttttttcattcaagctgtggccgctttggaacaccgccagcagagacaacccaccggatttcatgccttcaaaaacacacatcacgagtccgagcaaatgcagtatgtgtgatttttctgcaaaatacatatcattctgacctcatgatacgatacacaaagctggcaaagacatatctagctaccgagacctgtactacacgctctcagttgagccctcctatcctctcgcccacccggaccagggtttccatggcttgctcgcttgatcttctgatgtcttcatcccaggtcgtacttcctgtgggcgtcacaaggatcaccgtgctcccaccgtacctgttgacgtcgagatctcaaaacgagacgatccatgtcagtctatgctggctaagcatatctcgtttacccttctagacctgagcagcgatcagggcaaacgatcaaggcagcacagaagctcggtacgtacgcgaaccaaccaagctcgtctcctttctctaccttcgtcccttcctgggtgtgcgtccagttaatcgaaccaaccagcatggccccgacggcaacgacgtacacagtttggc

SEQ ID NO: 3215 - DNA, 2658 bp, Xanthophyllomyces dendrorhous
  misc_feature (819)..(828): n is a, c, g, or t
aacgacgtacacagtttggcccgaaggaagatggataggaaggaccgatctcgagttctcagtaaagacatccaggtcctcgttaatcgcttgctgcgtttcagaagatggccccacacaacagcacatatcagcccacgtagccacctcctagacggtctgaacggcgaaacacacgcagtcgaccacagcaggacgcaccgggtttacagtgtacagcttccctgggatgtttatgctctttccaagcgttccagacactggcgtatggaaccgatggtagtcctgtggggccagccggaagactgcaacagcaggactggggccgagagtggaggcaaaggcctcgctccccagtagcgcagggatagtaaactgctttcctttgatcctaggtatcgacatcaaccaaagacagacgtccagtcgcaaacatcttgagacagaggacatctagtgagatgcatcacccatcgcgagatccatgcttaccatatccgggtggcatcctcaacacactgccaaacagtcagtcggcagtccgcctgggagactaccactgccgggtcggaaggcgaagcgataggtcgagcatccgctctgagcttccggtagaagaactcgttgaacgtctgggaacaaggtatgtcagaccacgtgtcaaaacgctgagcttgacagtcctctcaatcagtcagacagatgacatacattgtacttgctcagatcaggttccaaaagatcagaaagcggcagtccaaactgatcgacaaacgattgtatgtgaggaagaacctggaagatcgagaatcatcagcnnnnnnnnnnttctagtcacgtctgacaagacgagcaggtgtctgtccggcttgactcacctggggacccatggcatcgaacgtctggccttgtttcacactctgagcgagtagcagcttttcgatcttggcctgagacatcaacggatggccagtcacgaagagtagatgcatgccactggagggaccacagttgggttccatagagtcatggctcagtcgaacgctttcaaggcaaatgggccgagtagagcgagaggatgtatatagaaactcgagacatatcactcacatccggacatagatcggcatctcttcaaagatcctctctcctgtcgaccggacgatcacaaagctacaagggtggacaaccagcggcagatcagctacgccggcgtccggtcgagcacggtcgctatgtccttgcaagacaggcttactttcccatatgttcagaagcaaaaagctgggaaacacaaagtctcatcagcagccagcacaagggaccaaaagaccgccagtacagaagctatagcaggcgacagacgccttatggggtccttctcaccttgttcatatcgtcctggtcaaagaacttggcaagccagcctcgcttcgagcctccttcttgagactgatacgaatgagcatcggactcgcaggagtctgtcttgccggctagtccagatgttggccaggatatcgacacaagtcacagatccagccaccagccggtcagaactcggtcgagatcgatctgacggtacgaagataggcggtcttgggcaacgcgagaacacaccttgctcaacgctctgcacactgcccggctggacaagatcctcgagggctgcttgtagtttgaccgggttctcgtctttgttggccgtcttgacggtctcatgagaaaccgagtttggagaggatttaggttggccgaagcttgggatgtgcatcttgcgagatgattgttcaggcgtgaacaacagcgagtgccagaggccatctcggtctggcgatgttgaccggtcgcggcgaatgcaatagtgacgtcaaccgagatacgcttcatgccagtcgcgacggatgaagttcgcctgtttttctactcaactccttcgacttggttttctatctagtagaaaacacattctgtctcagtttctgcccgaacatctgtacactgttgcaccggaagcgatgtccgaatatgagctagctagacaggaaaacatcagagccaaccagcttctgctagcgtcgctaggtatagatcccgttcaggtagatgctgctattttgtgtcgttcccgtaatcgtctatgttgctgatctctcgcttcccatgctgcatacggctcgatcatcagacgaagccagctccaacaccgaaggctgagcctgatggaaaaccaaagaaccgaaggccggctcgatccaagccgtatgagcgagctcgagcagtccctattcgacagtcagcccgaatatctgctctcgatgcgcctatatactcagaccacctttctatcgctgcatcgatggatgacaagcagggcagtattcgccgggtttactcagactcacctcctgcagtaagaaaggcgatccggcagctacctcgagcgccttctccgtatgttgaggacgatgtcgactactcgatcgtcgcgcctcaacctgcgagagacgacgacgggacattccgtttcgaggctggctacgaaggcttcacaccaaacatggctccgtgggagatgcttcgagagggaagctttggtggatcttactggaggtaagttctgtactactcagactaccgtgctttggtcgatgtctg

SEQ ID NO: 3216 - DNA, 15178 bp, Xanthophyllomyces dendrorhous
agtcatacagacaacaatgtacttccagtttccgaatgcctcaatggtgtttctctcgttgagctagaaaggtttcctcaatagatagacccgatggctagttctgattgcctgattctgatctgaattttctaatgggaaaacaaactagctactgtatattcgagatcaccaagatggaaacgatatagaaacaagatggaaataaagtagaatggaaataaaacgagagagaagtgaaataaagatgatgtagaaaatagaaatgaaataacatgttgaacgagaaaccgaagagatagaaagtcaaccaactcgcaacactcggtggttggtgtctagactgctatatccaatacttccatcgtggctgtttctcttagtgtctttttagcctctttcttcttatctttcttctcatccaagcacattgtgttctctcacatatatctgcgctcgatactttcgtttcttttcttttctttttctttttctttctctttttcccttcctcagtattcacaaaagactgtgttatgggcgcgggcaagggggctgagtggggacggtactctgtgcgcttgagctctcaagagggaagggatcatgcaatattgtagagggatatgaggagatagatgattgtacggagctatgaggagttaacgaggttccaaggtttggagagaaaaggggagatagctaacgactacctagtatatatgtcattcgagatatcaagccaaggaaacacaagcaaacacaaggaaacacaagcaaccacaagcaagagcgaagagataccaaggaggagctgagagataccaaggaagagtcaagatataaccaagagagagttgagatataccaagagcgagttaagcagtaccaagaggctgttgcaaaaatcggtctacattgcgcaaggtcaccctgcgcggatcaaaccgagtcagatcatgacatcatagtcccctacaaccatcctcattataactactctgctgtgttgtatgatcctttcctgcccaagagcctaagggcgccaagtacactcactactcagcccctctgcctgcgtccataacacaatctcgcgctataaaaaaaattctactgattctcaatggtctttttacgaattctactcatcagtatagaattcgagttacagatctcagcgttgatctatatcccttgaaggtcttatggcctgcttcgtgattcaataccacctaagtcaacaatcaagcaatcctagcaaaagctgaggaaagataagtagaagaaaacaacagaaaggacgaagagatgaggagacgagaagaaaagatacggtcaaacgttgaaatatatgtcaaagaatacaaaacggaacatggatgtgaaaacaggaagagaaaggaaggtatggggagttcgagggaatgaatacactcagaggaaagacggccaggatgtaagaagatgcctgctggatttccctactgaaatttgccgaacttcgataacttctatatcaaccaaaatcgtatctttgcggtatgctgatgccaatgatctcctaatccgtgaacatattctgagcttactgaagtaggtgtcatgtgcttcaagtcacgaactaaagtttcaaacacaagcgctgcatcaacttcaatgtccagcgtgcaaatcggcatcttcttgtttagctgcttttttcatgttgcgttccagctccactcggcgaccacctagtccaaatacaattggcttgcctcgaaagtcttcttctgtacgcctggtcaacaccaaccaaaactgatataagtgatcattggtaattgcagaacgaaatgcggaccagtcctgatgtttcttaaggctagttagcttaccgtttaatcttgctcatttcctccatgtcacctatcagatgatggatactcccgggtgaagattgaactatggatttcatggatgaatcatgtgcgagccagaccaaaatgttgggctcttgatccatccttcccagagaggtttgagtcctggctgaacgttctgtacattgaaccatacacagtcaacttgaaaatgcagtgcgagggatgaaaaggtgttttgaatctatagtaagccttacctatgtcttgctcaaaagactggtctttgtttccctctgcctccgagttccacttcttagcaggattctccccagccttatatgtaccaatagtggctcctctcagaagtgaaatatgatgcgctgcgtcgcctgcaaggatgtggtaggtggggcagggatatagagaagtcaatgccaggagagagatagatcctggatgatgctagttgatatacaaatcatatgaagaaaattagtccaatattgatttgtctcagaaaaggcgatattggaaagatgtatcggaaaagaacgaaaagaacggactccaggagtggacagaatgaaaagagaggagtcgccataataatcgaaccctaggaggccaaaaaatgcttatatacgtcatctgcctcaatgtaaaggtatggtaggtataaagggatcgcctaccgacccctaagggaccaaacatacccttaaagcaaccgacatcaatccactggtcttcatcgtttgaaagaaacctatatagtggtacttgcaaatctaagtcagttccgacacggagctagcttcattttggccatcttgaatgactcacctcacttcgcgtccgtcaatgccagatctatcgaccttaaactcgttcattaaatcgtctgttgagggctccttttctctagggccaagtacgattgatacggacttgggaaaggcagaaatatcggagacatgatcgaagtgggtatgactgagagaggaagtcaagagggcaatttgagaagagaatttagtatcaagagttgttatcatcaaacaaagttcgatatggatatcagtgtacctgaaaaacacagatgtgatcgagtcaagaggtatgttttgagaagacaaaacatttgccaccgacgtcggagcttctccgtggtatgccttggcagcatccttagtgatggcgtcgtatttcaagtcctggaggcgcgatcatacatacaactgattattagtatattcaacttcaagagcattctccaagtgattgctaatcttgatacaaatgtacaaagagagcatggaaagaacgatgaagattcggaacggatatgacaacagccaacctgtcttaagccaaggtcccagatgagtctctgcccatcagctttttctatcaagaagctatagtcctcgagttcggcattaccctcgtagccctccacaaagagggagccaggaattgataggtgcccagcaggaatgacggacagtttgaacggctttgctgtggaacgaggcgttgggatggcatagaaggggatgtcatgaggatctagcggatgtacagatatagaagacatggtgagcgagggtcaatgtaaagatggttatccagaggagatggtaaacaggtcagcgatccagacccatctttatgtcagtcagttcaaatgcagctgtggatgggcatgatggcatacgtctatgcggtgactcagttgtatcgagcctttctacgtaagcgagcaggcgatcgatcgaccccaagcgtcacatcgacactcgcaacttgtatctttctttcgataactgatttctcatatcgagcatgatgaaaaacatcagaggattctgacaagacattcatatatatagatgccgcttgaagaccagagaatgtctgactggttctggatcttgcatggtcggtagacggaagatcaaccgtgtgccatgatctcatacatttgaatcattaaagaagaggaaattacagagagtcgtgatgttgagatttattaacacaaggatgaaggagaccgcagaccacaagccgcaaaacaactataacgcaataagaggagggaaagcaaaaactgggtacatatcagcacctagcttgatactcctcgaaggctccaaacacattttcccctgaataagtgatctttatgtccaattgataagtcaatcgatgcgttcagtacgaagcttgacgaaacgttcaaacgacggtgacattgactaacatagagaaaaccatcttcgtccttgtgttcttcgtacactgcgctgatcaatgcagccgttggagggagaacctaaatagaacagaagacagcgacggatgtttcaaaggacatggtcattatgaaagtttatctgatgagactcaccctctgatgcgttttgcagaaacagagaaatggtgaaatggcgattttgtcaggacgtacctcatctacgaagataaaaatggccttttcagcaggcaacttgattcgcttccgaatcacatagacaaactggccgacagtaagatcctgtgagttggcaaacaacgaaagcaaaaggcaacatttgacatgagaacatagcagaatgatatagtgtaagacgaatgatcgcacagatggcaccaggtacttcttcttatcgatggtagggatatctgagttatctccgaaagaacaaaaggtttcaattgaagaaacagactttgaatcagttaaatgcaggaatacactgcgacaaataggtgaacacaccagtcttgtcccctttctcgcagatgactagatatatgatcatgttgagcaaaagcaaagggccgatgtcagtttcatcttcaacaaattttgctgagaacgccgatcatgaaacggacctggtattctgagaagatatcacggtcaatcgagacattgtcagtcttgattgaagtctgagtgatacgtggatgacgaacttcaggccaaacacaaaagatgtaagcatacctatcgctgtatttggccctgattctctgggcctctgcctgtcgcttctctacaatggtgatgattagtcgaccagattttcgatagaagcggaaagtcaccggtggaagcagatcagacagatatgatggtaagtgatgatgtacggctgtataagaagggattgaaatatctcgtatcaaagcggcccatgatcacgaagacaaaactcaccgaaaggatgttcgtccttgaactttgatcgaaccatggtatgttgagtcaagaagaagttttgttgaagagtttgagagcaatatctctagatacaccagatgaacagaggaaacacgaaacaaagccatgtcggtggcgataacgagaacacaagttgcgtaatatgcgagagttaatcgtcacgaggacgatgggtcagcgagatcattgattcggttgcacgacagccgccacgaacaattcacagaagatatgagagtattctgatcagtcaggcgtacacttctgtttcagaaagttgaagatgagaatgagacgaacggagagagatgtgagatgtgatgctttgttcggtgttgatggtgaaggacaggataaggaacgacaatgaactgtttctaggcgatgggatggatgcaagtcacatatagagactgctgcgggtctacgttggaacatcgctgactcagctgatccttattggttatcttagaagtataagctaatcaagaaagtgtgttgagagacatttccactcaccctcgcgtcatacgtgtcaacgcgtctcatctattttgtgcaaggttaaaaagggcgactgattttttcgcttgttgtggcccgttttctctccccacctccattccctcctccatcactttcatcagacatactccacttgaccagctctatattcctacctactcttcagcagaaacttgattgaacatgcctagtcttactccttcttcttcctctgcctcgcagcatattgctcctcttcaccatcccgggcaagaggccgtcgttgttcaacctcatgctcctctgagcaacagttcggccggtaagtagctttccttcctttatctcgacttgtgccctttctctctattctgccgtgattgtgcatcagttcggatctgcttcatacctccttggctatcagcaaggaaactataggtgcttaagacaccaaaaagtgtgagcataggtggtttgcaaagctgacggttgacttggtggaagatagagaaaatgttgttggaagaatctattcacatttgtccttaccccgagatcaaactaagttgtttgctgaagccttatcttctattacttgtctcctttttccgcttttctggtgacatctaggaaacaacatccctccttcggtcaagaacaccattactatggggtctcagatgggtgctggccagaaggctcttcttatgaaacgaatggcatccaagtttgtgtcctttcgttcaaagctgcttacattactacaattgcagaaatatttcggacccagaacggcgatctcatcagagctttcttcttgacaaacattctcatgttctctacagcaaaccttcaatggtatcgccgacggacaacatgatgtcgccttgtaccgccaagctggccggcgcaaagaagaagcactttgccaagtacgttctaatgctgcagttgatttttggagaaggtcaaacacactcctgacaacctcgggccgcatttactgacatttttgtcttttcttgtactgtatgttcagaggtcgacctatggctcttgcgcagtctttctctgcagtggctgattcggcagacgatgtaagctttcttttctttcttttgtttgcatgttcaaaggcgacatcgatcacttacagcctttttcatctaccgtgacgatcaacaggatgacgagaatgttgctcccaagtaacagtcctttgtcatctcctttctgggcggctcccagattctatctattcacttctcttctccattcctcaatttttgttttactataatgatgtacttttatcaagtatgttgattgatttctttttccctcttcatcttgatttgagccttgacagttctcgctaacaaacaatgctttctccatccccgtctttctaccgttttctaggatcattcttcgttcatatttgttcagtgttggtcacacacacacacacgatctttatttggatagcacctcgcacgtgttccgcgcctttcgttttcgcctttctagatttgttcttttttctcccttttttttcttctcgcgcgacgacctcctttgtcttctcagacacctatttttccggtatatattatctgtggcttctcattcatgctcggcttgctaaattgctcatgtcttttcctgcagtcgatgtgaaaaccgtatgttgattttcgatcaaagtatcatttgatcaatagtaagacattctatttaacggtataggaggatacaaaggttggcagatgcaagttctgaagagggcaatacaactgccagaacgtgtcgaacggagtgtagaagacgggctgggccaatcgtctcgttctttgaaagatgattcattaagcagaagcgcgctttccgttgccgatagtgctgatgacctgttcgtagacgtagaagacaatacctccgctcaactgtaatttgacgagagaaagggaagtagatcatatcagccgtcactagctggtaacagaaattcatcgtattgaatgacatttgatatcgtgaaatggtacgtacagtcaatcgagctaaccgaggtgtcgttcccttccaaaaccgaaggattccctcctcggtgaagattcggtaaccacaatgaatgaagttcctgtattcagtcttggcggcaagcgactgcatacgagttttgattacgctgacgtcggtgaaaaatgaaaataaaagcaataatgtgagaagactcgttcttgaattgtattgttagaaaagggtagtccatactcaaagggcattgtcgaatctaccagataaatgatacgatagtaacgcaaacaagacaaaagttaatgactatgaggagaaacatacgaagattgtagagatggatgcacttacagacagtaacgattccagcaagggctccgattccaaaagtgacgcctcctggtagaggctggccggggggaccgtttccttggactagctgcttcaaagtagaataggtagtgaatctgacagcagaattcgctccttgtcgaagcatctagcagagagacgacgtattttcagttcaacccttactcataactctgaatgaatatatagagagagtgtgaacgcacgacggccgatagacctcgataaattccagcaaacccttcacttcgaatgattgaagatgttccatgcgcaagacctctgaactgaggatctggtcgtcttgaatcctcaatcagcttggtcctaagttcaccagatgacaagaacacaagtcagacatatacgatatgaaatgaggtcatcgagaatgcgccgtgcctacttgatagtctctgatggtgttactgcgataactgcttcagtcattcctgccccgagaccagctgttttaacaaaaacgattcggtgagaaggattatgcaaatcgatgataactctaagcagttgttacaccagatgcaatacaaacctaacaagctccgaggggccgtcaatttgccctgtatggcgtgttataaagcaagaacgcgtcaattgtcgtcgtgatccccggttgatttgaacatgggggtcaaaatatgccagacatatgaagctaacgtacgttctcatcttgaagcaagctcttgtagtaatcataactaagaaatctcactccagccttgacagcatttccagccacgagagctccacaacctgcgtacagacccaaagggcccttagcactgagtgtattccgaatgatttcaactggacccggaggctatgaaacccgaccggtttcatcagaagcaaaagcacatgagccttctcaaatcgattgatgaatttataagtaggtttatataccttctggccggcgacggcagtgaattgagcttgggtcttgacaaactcggtaggataggtcacaactccttcaaccatcccggctatcgttccggccgtcaacgatgcccaaagaggttccttctttggtatagcggacatgtatgcgtagattcaaagctagagaaacaagtgatgtcgaaagagacacgaaagcaagtgagggtgaaagagaagaaagtaaaagcaatgaagttaagttgatcgacttttcataattccacaatatggaacaagcttgaaacggtgaaaaggcgatcgaatatcgtgacatcggttacggctcttgcacagcttctatttgcgttttcaatcacagagtacgtgctcaaactattacatctatattgatctctactttatcaaccctttccgacatatcgactcgactcccaagcgttccacaccatcttgagaattcctttgcctcctccgtcaagcccgccaccgaccatgacagaatcacggtccttctctcccaccattccgcatatcgcaaacactcctggctcaagctctcgtctaatcaacggagggacagtcgtgttcaggtcagtcaataatcgagtatacgctagcagcagatacggcgcgtgttttgaaagtgggccagcgagcgactcggccttggtcgaagcagaactagctagtctggtgttcaatcttggaattgttttggccgtcagggaagtcaataatctggcaagacaccgagcgtcatcagcattcaacggttgatcgacagaattaatccaaccaggaagagtggactcgacaattcgaacttgtctgcctcctaggttcgatcgaactgtctggaagcatccgatcaactgagagagcagtgcggacaagtggacagctgcggaagacaccaggtctcgacgatgacgaacaagatcggtcaacgagcttactaccatccggaacaagtcgtgacgagtggtcgaagaggaggcggtaccaagcggccgaggtgcaacagctcgagaaagtgtagcaaggagttgatcgacgtctggcatttgcagatgggaagccttcaggtttttgaagggaaatttaagtttaaagaaacttagaaaatttgtgttcaaactagtagacagacttgacaaggcaaaacttaccttgtctgagcatacagtatgagctatggaaagagcctgagcaactaccccacaactattcttgtcattgacatatgcccctgcggcgatgactagtttcgagactatggctctgtttgagactgacaacagcaaaggccatgatagagtgttagtacggtattttcaaatcagctcgcaaaaatcacttactttcagaaccctctttgaggatgatgtttgtggccaacaacttggcctctgttatggccggttcggcctcttcactaagcaaagtctgaatgagactttgcagcagactggtcctttcttccgaatctaaagctttgctgaaggaaagaagaggagcggacaggatcgacatgcgttgatctgtagagaaggcaaattagtcatgcatcagctatatcgttcgagtgcatgaatgtcaaatcaagaaagccgtacctcgagcagtgaaggccgagctcaaagcaagccagccagccatgaaaactgtacaagcctcgcttttaagggttggatctcgtacagtttgaacttctaccacgttcaggcgtagcatagacgaggcaagtatctcgatttcagaaagattctgtatagtagaagccttgaggaaacgcaaacaagctttgacgagctcttgaggcaggatccggacacctaacgacatggcaaacgccagtgagcaagaaaactcatggtttttggtactataaatgaagccaatttaccagtagaaagggttcccatccagctctcgaaagttcttgtgattgctagagcctccagtaggtctgcaaagccgcggaccaaccttccgtcgataaatgactgatgaatcttctcaaaggcatagctgagagccttctgcagtgggttgacaagctgttccagataggtttcttcagagaatctataggaacaatgaaggaagtagaaaaagccgatttagatgtgttgttttgcaaagatgttcgaaccatgatgactgaacttacttttttgagtttttgacctcttccatgatggcctgaagtaactgtaatctagatcggattgagaagtccagaatgaaatcctccgcgtcctcctcgttctcatccatctccattatctcctctagagaagtttgcgcatcattcgaagtgaatgtctctgttaaagaagctaacccgtctgatgaagtccccctgatgatcgatcttaagaaaaagaggggaaagaatgagaacatatcgttactcagcaccttcagttatataattcgactaacatacctgaatgtgagattcagtatcgaaagggtcgattgctccaacgttgcattgaatgggctcgaagcatgcagttcgtcaatcggactttggagtatgagataattcatgattttattatcgattgtctataagaatttgaagcgtcaatccggcagaacacaattcaatcaacagtgaccaaatgttaaacgctgtacaatttgtgacaacatcggagaaaggtcagcttacaaagtttgcgttggttcctaatgcctttatgaacccgaacgccacctttctcagcaaagctcttgcccgcaacctggtttcccactcctctccaggaccagctcgggtcagcttcagagccttctcaagactcaaagcccgagcgatgagctcagacttttgagagcgaggtgtgtattcagaaggaagtgcaagaaggagctcgaaacatcgcgtatcagtagcagaaggtgatgctgcgatagtggatgtcaatgaatcgatcgacttcagaagagagtgccggatattggcaagttctggtagctgaggttgtagcatcatagcgatggtcagagagtgtaaggtgaagggtcggttggcctcattcagagcttcatctccattggaaatgagagagaaagagttgatgatgatcgagcaaacagcatctagctgagttcttatgttcaagtagctatggaaatgaacaccagtttgatcaatactaggtatcttgaacggaataatgcgtgaccgacttactctatgacaccgatccaacgtccttcttctcccgtgagaagagcccagagtgccacagcaacagaggaatcgatcttgtgcccctcaagatcaagatctgctaatcggccagaccaagtggcacttgctacagatcttgagatgaagcctagaacgtcactcagtgtctttgaacatcgagatttccgtatctctgcagatggatggagtgaacttgaccggatatatgttcgaatctgttcaaagcagagacagaaaggaaggttaatgcttgttgaaaaatgatcacaaaacccgaatttgtgattagaaaaagactgactgcctcaacggtggcttctccgcctaaaccatcagcatctaacacgtcacccagcttcaaatcttcgtctttgcttaactcgatatcatctaggatatctctcaatgcctcgaagattctaagcccagagactaaccccatctctctagcccaaagatttcctttgctcttgtcatccaaacctagttcgaagagggggacgactacttcggagtggatggcgcggagatcctccttaagcgagttcagaagcccctcaggaagggaactgattaagagtgaaccagatgcaattatcaccgaagaagcaaatctactgaaaagagatagcacagctgctgaatcatcgatttctttgggtccaagtctgtattgatctagaccgccgttttcgccaacccttctcttcttccttgatctctctctatcgccttcgttggtcgaggatgatagagcgcgctctaaagaggcgagacaatccttcaggataaggcgcaagcttctcagcagttcggtcatttgaccttggacaccgagaaagctcttgatagtgcccgtcaagcagtccagccactgtgcatcaaaaaggggtcctgcagccaatgtttggtaatccgtagaaggtgtaggagcagtgatgatggcctcggtgagaaggtcgataaatgttggaagtgttcgggtcgatcgatgatatgctaataaagtgtttaggagactctgtccggaaggcgcagaggatggcatctatggacaacagtatgaaaagttcagatttgagatagaggacagtgtaaattttacaaagagccatgtcaacatacttttgagattgagatcagaagccgggatataaaggggtcgcagagtgtgcggtccaggcgcagaagaattgtcagggtcatcaagattgaatcagtcaaattgacgtcttcttctggtgaccacatgcgattgaaaatgaaaaaagttagaatcactacgaaaggtatctataacaatgtttgttttccgaagacgaaccatgagaagatccttccagctcgcctaacccccactctaatacagtcttacccaagcccaaccacccttcctcgttctccccctcttgatagcctctaccgactttgcctcgatcttctaatacttcccaaaggtctcgctcgcaagcccaacgctccccgcgcttacccttgtctccgatgacttcttttaatgctctcacaaacctcaatgtacatttgctgatttgctcggaggaatgaacctcaactggaaccttggcattgagcggtagcggaaacaatgtgtggcggtgtatagccaaaatcgaggtgaatatgcggagtagatggggcaaatagagcagtacccatgaggtcgtttcaggggcttctacaagttttgaaagggccttgtaaagctttggggtggcatctgactggccaatagattgagttgcagttgaaggctcgatatcttttggggtagaggcgataacaggaggcgcttggatgttctgagttccaatgagtcctcgaacttgtttgcgtggtttgagttgtttattagatggtggcggggggagatagattttgagattctcgaccggaaagatgatggatccttgaaggttgagaagcttaatgtaaagaggtgaggtgcttggtttatgagaaaggtaatggatatatgctgggaatatcgaggattggagatgagtttgagaaagctatgaggcgcgtaaagacaatcgaaaggtagatgagaaaccaaagccacgaatacgcatacaaaatagacacaaaccttggttcgagccaggttgttgggcagagttaggtttagtgaatctgctaaagcggccatgacagtttcccagccgctgatgagctcttcattgctatccaaattttgaaatctctcccagcagtcaagcgcctctcctagaagatccataagaccctcagctgtggtggacagaagttcgactatgatacaagaagcttgggcgacttcgtctaggagttgaggctgatttatcagactttcaggatgggaggggagttgacggaaaaaagaactgaggagggatgttgctgcagcaggaagagagaacacggaagacgacgtagcggacgacgagagagaggatgggacgggcagaagattgacaagtaagttccaatgaggctgcgagagaatggagggtgttctcggtacactgtccgaaagacaaacgatacgaaagagcacgatgcgtcagtacactttgctctggtcatcagaacgggaagacttatagcagcctacctctcttcctgaaccttgcccttgccctttgccttgctgcctcctccttgctttgtagccgtcatgtcggcagtcagccactccataaggacctccctcttggctgggaggtacagttttgcatcgaaccatgcaagagtcgccaaccgaattttatcggtcgatgatacggtgtttgacttgagtgtcctgaccaaggtggcggacgatgtgagctctactccattcatcgtctgtattgatgatggtaagattgaagagagcagcagttgaagcaaagctgagagaagctctgaaaggtacatgtaaaataaaatataaaatacacatggatataaatatttttgatttatatatgatatcac

SEQ ID NO: 3217 - DNA, 14110 bp, Xanthophyllomyces dendrorhous
atatgatatcaccttaagttagataccttctgcttttctttcgtcatctttttggagtttacttcaaaaaataatatatatctgatcctcaagatagtgtttctttaggctctctcgttgcatctggctttcatgatgtggaaactgagaggaagagtggtacggcttttcttcaagacggcttgactttctgtcgaccgaattccgagtaaacatcgatataaactgaccgaaagaccatcgcttcgatttaacgacagccaaagcattcgccgaatgctcgctcaatccaacacacctcgtcatcaacagcagcctcttttactaggcctcagaatttgccttcaacacggtcaccagcatctttgcgtcgtatattcgaaccaatcctttcatcagacatctaccttgcatcttcatcaacaccttcaaatgattttcttggtgatatagacagtgcttctccttacgaaactaccaccggcttgatccgctcggatgactcggatgagggaactcggttttctgagaagaggatcattgcgttccatgaacagctcaaatccgtcgcgctcaaatcaagatggcatgtgcaagattcacagccacgaccactgtctgttgaacaagctcgctcaagtataagcacggtgccgctcaagcttccgaagccttgttctgctcccgactccattcctgctttcttgacagagtcgatatcacagccatcatcttcagctactcccgcatctcactctacaactcaaccgtctacccagtacattcctgtgacactgtcgcaatctacacctgtacagccacctcaacgcacgatcacatcgtcaacaacatctgatcaaacttcgaatcccgcttcaaagtccaaatccgaatcgcaactggaatccaatctaacactcaaacctgagcttgagcctaagcctgggctcgagtggtcaagtcaactgcaaccagtccgagaggaatcacctttgacaccgtctatagtctcaacaattggttctccgagaattcctccatcatcatcttctcaggttcacctttcacgaagacctgtgacctcagtatcaatcagccgcaacgttcccattgcgagcccgaaattaatgaaggctatggctccgacttatggtggaaataaggcgaaaccgccaaattttttacttcctctcggaccgcgcaccccggtcgctcctctgactctggcacaacttcaacttaccaagtcgaaggccgcggcatcatcggaaaaaaacctattaaggaagaaggtgctcaaggcatggaacacccatcgaaggccggagaattcttgggacaagtcgtcccctaagacgtccaaacatgtgtcagttacggagaatgctgattcagagaacgagttttccataaacaacttgggtatctctttaagcaggcgcaattcttcacctacttccgctgtgcgcaagctatctgagagtgtgaatgtccctgcccagtttatgcctctgtcctcatcttcagatacttcacttgtattcaacaatcctcatactgcgctatccaatacgttgttggatcatttagtgcgcgagaaacgacgtttgaaatcatcaatcagcttagcatacgcccaatactgcatcgacaccctgaatcagtctctcggacaactcgaagtcatctcttcgcgtgatccctcctcatcgacctcccaggctattccgaggttgctaagacagtaccttcatcagtatcttctcgttcccgcattccatactcaaactcggcaagaggtcttggaccgaatgttcaggctcggtctccagccaagcgtggacctcgaaattctcatactccgtgcactcttccttcgtcaaaaaatctactcaaaagactttgctccctatggttcgttcattgtagaattatccagcctccaaacctacttcgataagcttcttcttggatcagatacgaacggacggtcaaacaattcatctgaacagggcacaattgatcgtcgtagaatctggtcgaccatgtactctggatttcgttcgatggccaagaacccgattcctaccgacttaaaagctcgcctcttggctgaggcacaaaaagaaccggttgatctagtcttgatttccaaactctccactgtgtgatacccacaataatgatggcagatctcaagtgagttagtgcgaccgcgcccccgtcgcggtatccaattagattaataatatatgtaatgatttgtttaaatttagaagccttgcatcgagatagtttgtgggaaaagaaccagctgtcgacagatccgacgcaataccacaacttttgtatgttgatagtatttcgctggttcaacaaattgtcgtgatttcatgtcgcatgttatggagaagtttcttagagatatctttggagctaagagagttagtcagtcgtaattcttttcagttcacactcacgcgactaaaatgaacaatatttgtgacagagccgattgggcccgtaggaaatcaaaacatccaccattttatacagcccgtctcccctcactgtcatcagatgaacagctgggtatagcgtgcgagagtcgtgtgcgacgggtaattgtagtaaaatagcttagtagattcggaagggctatatgaaaagagaagaagtgaaaacacgctgcgtcagtaccgataaaagaggtcggcagctgaatgattaggacagagaacataccttgcccatggaggacttgatgtggagggatccaacgttctgccactgcttcttgagcaaagagacgaggaagttgatggaaagcatgacgttggcgaggacctggtcctcggtcatgtcacagtgtccgacggcaacaccgaggcagagaaccttcttcaactggaacttaatggtggccttaacctcgttgaccttaccctggaggtcgtcagcgtgggagacgggggtagggaactttccggccttggacaatccgggtccgagaagtcgggggatctgcttgatgagggcctcggaagccaagaaggtgttgtacttcttggcgagcttcttgaccaacttcttgttcttgttgagcttcttcaagtcatcaacggacatgtactcaagctcgatctgcttggccctgtcaatgtcagcggcatcagccaagatgcagatggacattcggggtcggggaatgtagggaagcttgacggttccagagaatctacccaagaaaaacaagaaaagtaagtggactgtccctatatggcaaagagaacgtgagacgaaccgcttatctctctgaggatcgtagttcttaagaccgatctggagctcgatggtctcaacgaagttcctcttcttaccgtcctcaagggaggaggcagaaagaagggagttaacgaatcctcgcacgctggaagctagatagtttagtcggaacaagacgacatatcaggacccttaaatcgctcgagtccacctctagtatcgctttcgattaacaactcatcgagaaaattcgggtagtaatacgaaccagacaacttggacatttctgcagaagtaaagcaacgggtgataggtcagtgtgataaacatccctcgccttatacatgctctgctcattcaaaaagcagattgcaaaatactcacttgctgatggagaacaaaaaggttagcagaacagagaaaagaagaaaaacgactcgcaaaaagtcttgaattttttcgcccacaggcgcagcggggcgtgacggaatttcaagtttaggctcggtccgaaaatctaggccatatactcctgttcacgtcacgtgcattgagacactattcaacctgagaatgaatcttgccaggaatacgatcatctctgttatcaccatcattcatattcaaactccttggaaagccatgacgcttttctcgagatggttgaactccaaatgataggcacaatatgtttacaaggttgaaaatctaaccatgaagctagaaataaaattcaaaaagagaaaagatagaccttgagaaggaaagactgctgtaatcgggaggggatcggttcaagcgaagaggctaaaacaacttcgatcaaggaaaggaagacataggatacagatttatctatcctctcatttcttgaacaaaatggttgcgtcagctggtagctcagaaggacagacaaaactttgtttgctattttcttcaggccatttttaaagtgttttgagctctgtctttagtgaagcatgaagtggcctaaacagaggcttgatgttaaatttgagatcagccgtatatccgtataactatcgcagaggtgaattgtctgcttcgatcttggaattgcggcaatttatgcagtgtgcttgactaggatagaatctacagtaagatctatagtgggaactggaacataactcatggagaaatttgagatgaattagcaggagctgtctgtaggtgctcaggcgcatcaggagctaagagaggccataaaagatagagtggaaacaggatgccgaccatatcacaaacgaatgagttcggtgacgataccacagaggataacccaaggtcctgttctggaaactctttcatacgtataaccaaagcatggtatctatttagtcttacacatttacaattcggatagactacaaaaaatattgcacggcctatggagaaacagaccaaaacacacatagacaagagtcaatatatagaaaagtagaaaagcgttagataaatacagaggaggtcactgaccttgcccatctgcgctgctgcttgattcggaccatccctacggaaataagagcaaccgagtttcaatcatacgaccggtcaatcatgagagttcaatataggtcaaagactcttctacagaatatccatgaagcaaatatcacaactcacgtttcattttctggtgcagcagagaaactaccggagaagatattcaaccaaaagctcaatattatcaatcaagctgacgataaatactgttcaagatctcaattagagtatatgtattgtgttacgtacatgttccaatgtttttgtccgtctggtccaacctccagaatactggcttggttgccacatcgataacaatactgccccgacaaagtacgatgattttagacaaagagatggttactcaagtttgatgaatacagtacttcaagaccagaccgccaaagaatatgagaagactcacattgggcgcactccatactgtgctcaattgtttgtcgaacagttcggaatacccatccatacagagctggtgagctcgaagcatatgatcaaacttattcaagttcaagaacttttttacaacctgagacccaaacgtgtaaccagcgcctctgatgatattcataccaagcccatgaccagacaatacagaaggcaccagaatcagcaaagtctcgaaatgaaggacagcagaagaagaagaactttacctaggtgatattgcaaactcctccttgtctgcatccggatcagaccataccaggtcggccatgggaccttcatgcggtatttctattgcattgaaacccaagtatatgtgagtcaaaccatctatttgaagcatcacagaaaagtcatctacaaacctctaaaacgatcgatgatcttgatttgatcaattccatgtacacttggtgacagccctgaagatacgtcagacaaagaaaacaggcccacagtaagatgaacgcaatccaaatatgagcatcagacaccggataacattagcgcagaggaagataatattgatgggcacggacctccatgcacacagaatatccgatcgtctataactacacttaacgtcaagaaatcgaacatatcggtgaaatattgccaaactagaggtgatccgtatttgcgttggcactcagtatagaatccgtatgtctaatgataacaagccgggcccagattgccaagaaatcagtacgtttcgtaatcggacacaaaggagggacgcgtgagcacaaaagatatccacctgggtgacagctcttgattcatggttcccccgaatgagctgcactcgttccggatatcgaagtttcagacatgtcaagagagatattgtctctacactgaataacccacggtcaacatagtcgcctgaagtgccggtcatacgggtggacaaaaacagttgagctcggtccgtgaacaagatcaaagttgaccaggtaagcgtacctagaaagagatagttcgtgtcgggcacgaagccacctatacggaagatctcgaccaaatcataaaattgcctgttgtttgaacccatggtcacaatagtttgagttagaacttgaccgcgatttacgttgaaggcactcagagtcatgcactgcgaacaacggcaagatcctacgatatcacagacagaagaaagagttagagagaagaaactcacccatggatatcacccactaccgtcaccggagagctcacatgaacgacattgctttctctcatcaggacctctttggtcttctcgcaaatctctctgagaagagcttcacccaagagtcgtttttgaagtaatttggagatacaatcatcaatgtcaaacacacccatgcctagtacggaatgatccactggatcgttatgagagaggaagatgtggtggaagggtatgagtgaggcgatcaacagatatatcggcgtcgttgtcttaaatccgaaacacaaaaatctaaagaaacccaatgagccttgaagaggctagaggaggatgaatgatggaaatgctgagctttcactcccctttcggtcacctccaccgggcgttgatcagtttcttgatctgattatagaaaattgtaattggatcgcgtcgattttctagtatatcgtccttgattttcattacgaaagtcttgaacattctgtagtggacatggcgttgtttctgattgtgtggcaagtctcacacatggtttccgggctgtgtgtcaaaatcgcaccaagccctggccaccaccactttgagccctcttactgccaacacgctcagttgacctctacaaattatctttctaccacacaaccatggctcaaaactcttctaacaagcttgcatctgcctctgggtctggaggtcgaaaaaccaagtcgaccacaaagaagggagccagatcggttcctcccaagaagcatactgctgtcgtgagcagaactatgcagaaggtaagccactccttctcatgttcggttcatagtccgcattttaactatactgatcagaggccttcatccgcttgtacggttctctatccatcagaatctgagtgcaaagatcaataactctattgagcgacagatggtgaacgctgcctctggtggaaagctcacaatcatgaagggtaatggagaccctaccgacaaggccaagtaagttctcggtccttatcaaagttctcattaaatccgaacgaatgtgagaaagaaacttaacttattcttctctaatctcgatcttccacatctcatagggatacgaagggtgtctcgaagcctacgaagtctggtctgaagttcgataagcccaaccctcacgaccgagccaacatctaaacgaaagacgcgtttccttcttcgcttctatatctaccaattcactgtaacgggtaggaatagattcaggccaagttggtcgttctgtatattatgtaactataccggggggatgcctgtttggtagatcgaacagaaagaatatcgttattgtaagtattgcacgcatctcaagctcttttatccctctttactcttttcatatatcttgattgattgtttttttgtttcgcttgtgtggtgttctattatgaccatatattgttctggctcaatagatacatgcgctccagaatatatacattttccgttaagcttttcattttactttatttcggagatacatacagttcagtttttcatagagcgacatcatagagactgttatgcgttagcttttagtttctgttctgaactatggatttgcgagaatcaaaatcacgagaaagaagaaagtggaaaggacaagaagaaaagaatcgaagtgactctgtcgatgttagggttaacgctttcgggctatacccgactcactaacctcaagagcgtttgttgagtccaccatcttcaccaagtcttcggtgcttccataggctttatcacaatgtcgaccgcccgaaagcgtaccgagtggaatcgtgatttgatcgctcaatcaatccttcaaggccaacttttgactgtctaccatgacaaggttctcagattaaactcctggcttgggcaccatcccggtggagagctcgctttactccattttgttggtgcgttatttcgaaaattccatcaggttcaccgatctagatcttgactctatctaagttttgttgaccaaattgacgctgaatcttcattttctcttgtcatcgatgggatcaacttataggaagagacgcaacggatgagattgtcagtagtctcaacctcaatggctaagccggtgtcactactcaatctgacagatgccccttcgtcttcatctaaaacacactgttttttttttcaggaggcatatcattctgaagaaactcttagcgaaaagattgatcgatattgtgtcggggtgctggctccctccgagaaaaaagtacgactgcttcttacggaacgagagctgttcaaagatcttgtatgctaatggagtctgaatgtccgaaacaatcggatagtccttcgtatctttgatccctccgatcatgcttggattcacattatctaaatcttcatcaggagattgcacctgggttcctctcggtggatctatccgggctctctctgataatcgtgcacttcaaacaccctccattagctcggcaacgccttgcgacacaccaccagtatctgaaccagacagtaagccgatatcagacacgcttcaaattcaagatctgtatcccccttctgttccggctcctctgtccactctcgaacttcagcaagcgcatacaaagtcttaccgtcaacttcacaagaaggttcgagacgccgggttgtataaatctccaggtttcttgtccggttatggtggtgattgtgttaggtacattttattggccgtgactgccatatgggcttggaacaaaggcatccaagctgaggctgggtggacgagaaaaggctggctaagtctcgcggcagtatctttggggctgttctggcagtacgtatatcttttcctctcatatagtctttcgcgcattacctgtcttactgttgaagatatgtacgctgaaatcagttgaacctcctttgctcattcttcatgtcaaaagacaattgacatttgttgctcatgatgcaggtcatacatctatcctcggcaacggtgattatatacaaaaccggcttttaggaacatttgtagccaactggattggtgggctgagtctaggatggtggtgtgacgttcgtcctttcattcaattcggactgtggcaatagattatacactctgctgactagctgactagctcacttgcaaaatttcatcagaaccataacattcaccacttggtcaccaatcatccagaacatgaccctgacatccaacatcttccttttttcgctatttctcccatcttcttcgattcgattttctcgacttactacaatgctcgtaaaccgctagacaaatttgcgcagtttgtcatcccgtttcaacataaaacgtattacgttgtcctcctcctagccagattcaatctttatgtgctctcgtacgcttggctggctaagtgtgcgctaggtgcaggcggacggaagaaggaaagatggtttaatttcgaagtgatgggtctgatcatattctgggcctggtttgggtatggcgtcttgggctcattggatgggaagggagagagaacactcttcctgctgataagccatgtcatggcggccccggttcatgttcaggttcgttgtatcaactcatctacttgtgtgtttctctacggtccgctatacagagaagaaacattgacaagtgagctaaaaccggtcctcctcatctttcgcggaatatcattctttagattgtactctctcacttttctcgatcgactgaagatctcggcgttctagaatcattcgcacaccgtcaactccgaacgacgatggatgtgcgtctgttctctactattcttccttcttcttttctattcggaaattttgatctgactggtctcacaccacttcttttgaatatcaaaaatcaaaaaggtgatctgccctccatcaatcgagtttatccatggcggtctcgacaaacaggtgactcaccatctgttccctcggttaccgagacataaccttcggcaagcttctcttctcgtcaaagagttctgcgaggaacagcaaatcgagtttgcagagtggacgtttgtcgaaggcaataaacaagtccttggtgtggtaagtctttacactcttttattcttcagaatgtatcgttaattaagcaaagctggaagagagatgttgaccgtctccttattcaatggtaacaaataaatcagcttcgggatgttgccgaccaattgaaattcatcggcaaggttgctcaagccgaagctaaaggagaactcagccaagggaaataagaaagaattccaatccttgtctgtttcttctagatttctttttgtttttgcttcttatcgcacatatatacgtgtcttcaaagcattgggattgccccctattcatacgctctttcctcacttcaattgatttcagctggctaaatcaactattaaatcaagagctaccaactcaggatctatcaaaataagggcacggacttcctctttatccatctttgccaaatcttttgcgactggattgattctggttctatttcttcatattgtctggttttcgaggaaagtaaatagatatagatggaaacttgtgaaacaaaaactttctttacatatatgagatcatatgagtcgcttctgggagaacgatgaatgaaggagagtcgtcttccgtggtcatcttgcgttgtaggctgacgttcaagctcattgtgctcaagagaaccttcagaatgcgttgtcacgtgacgtttttgttcagtaatcccatctagcgacgttttcatctatgacaagcctttgtctcgagcgcaatctcaccttccggtgcctatggaagtgcttgagtttgtgcccatccgtgtacttacatgtgtactgatcagagttgagacggctgaatccaagctaacaaggatcaagctaacccgccaaggatcaagatacatgtcactgacagcccagcctgtcgtggcaatgtgcagcatgtaacatacgagctcggccaagttcgatacacaggaacgattcagggacggctgccgctcctagtcgttcaggacgctatcctctctgtttccattcccgctcctgtcctcgttcctgccctcttcctccccatgctgcatcccatcgcgctctctctatccttcacaccgacgaacggcctggcttgcttcgtgccagacgaggagagctgtgatctgcgttctgtgtcctgtagtctgtactatgtgctctgtgctatgggtcatcgttgatgccaggctgtactctccgaatagacgctcgatatcgagctagtcagttggcccgcctattcgcccacatacctgctccctctcactagcccgctctcgctaactctcaaccgactgactgaccgttcccgtcgacaccgtcgtcaggcgggatgttctgtgagcactctacccgcctgctagcactgcgacttgccttgttgatccgtatggtcagccgaagtatttctgctggggtataaagagcactatgctatctttgtttcgtgttgtttcttgatccgcgtttgttttctctgttctgtgttgtctttctatccaaagcaaacgccaactcatctacggacgaccgatacccaatcacctgttcaccgcttgcccttctcttcttcatccttagccctgttcttaagcaacgtttccacctgtataccatacacatatataacccacttcatatttcgaactgtttaaaaatccgtcgtctatcacttgtctcccggctcacgctatttgaacgacacttaccgttcgctcatcatgataaacaccaacccttctacttgcgttgaacgagtgtcctgcccttcgactccaccccgcgtccttcatacggccaaagttgccctccatctcaagtatgcttccatggcgacttcggccctgcctatgcccatcaccgcaaagaagacactcggccgaacacctggaaccgccgctaccaagatatccggttctcgacaacccagcaggataccgaaaagggttcccgtcaaaaagaaagcacatgtcagccattcacccatcgcagttacttcggcacgatccctcgggcggcactcagtttcaagatcttctcctttgcggaaagaggtctcgctcttcgagttggctttcgataccgagccagcttcctttcatgaccttcacatcctgcccactgccgtaaacactccaatcgccaaggattgtcctgcaatctcaatcggctctgcgcaacttctccaatttagcgttgagcgccctctggtttcaaactttggccccccgtcgatcagtaaatcctcctggtcaaataagtccgatatacctccgatggatctgaaggagaacactgagcatttagaggtgcgctttccctctttctacgatcgtttggctcgtcttttattgcgtagatcctgtcgttactttaggacagcattttcttaacacttccctctttctgccttccttctcctcatacatcttctgttccttctcgaccgatagtcttctaacgaagatattatccacgagctgctcccaacactgtcctctttcctccctgatggtccgtccagacgaggttcacccagaaaaaagcttcttttctgggtccggtcacattcccgaggtctctctgaatttttgtccaagcgctcgttgcgatcctccaaagaagaacactgagaagacatgtgaatgaaggttcgctagatgtgaatatatctggctaacttttgatatcccataattacactctcttgcttccgtttcgatcatttcggttcctccgcccctttgcctgtttatcttcctatcttcctctcagtctgttttgttgaatttatttcttggtctttttcttggctagttacgtttctcacccgtccctcctctttgcctttctccttcttgtctcatctcatttcttgttgcgtcttcatttctctctctttcattcatataccccctatccatcgttagcagtatacccccgatttcaatcggctttgctatcgtttctgtctttgtcattgtcctcatgtcaatatcagtatcaacatacacaaagccttatagaatgcttttaagacatacaagctgatgcgagaagctcacgccaagcgctgtcaattaccgacttttttaatccaatctttcttgaataagtaatcaacgtgtgatggaagtgacattctgtgtgcggatcctagaggaaagagtgagaagaaatgatttaaacggctccagaagtagaagccaagatggaaacgagaatgaatgaggaagaagaaaataaaatcatggaagcaagagaggaaagagggatgaagagtgaaaactatcacatgaaaacatatatagattgaggtatactagacaaaggaagaacaaagacaccggtgataacaaggtgtaagagcgaacaaaacaaaaaggagaaagagcatcgttttttgtttcctgaagtggaaggttgagtttattcttttttttattttttggttaagattgctagaaatctactaacagaattctcaagtgagacccaaaacaatcaaggaaatcggcggaaggtgtctgtatggcactatctggtcggcaagagtttaggaaagagatgaagaggacacc

SEQ ID NO: 3218 - DNA, 17986 bp, Xanthophyllomyces dendrorhous
aacgacatgtgcgatgagagtacgcagaattgaggcaggagcagagtagagaaagagaagtagaaaccatcagaagtgggagtagataatatgacaacggatggaacgaagcaagacaagaagttcgacgagatgaattgtgaagtatgaaaagatatgaaaaggagatattggaaaaggagaatctggtgtccagaggaatcagaaaacaagaggtgtaaaaggaaaagtccgaaagagatggaaataaaaggaacacgctcaagatgattcttccttgatctctcctagagttcctctcaggtcgctcacccttctccctcttttcaaaccttcgaccacggcgcctccgtccaccgctccgctcgccacgccaccgcctctcgcatctaagatcctcaacgcctcttttacaccctctgcatcaatctcaagtctccgtcttttgtgtgcttgcgcctgtgcgacagcagccgatattgagtttgaggtcgagccagcagatggcgtgagcgaagtcgaacgaccgttaagataaggagaacttgtgtgcgggttaggggagacagaatctagtggcggaagagacgaagtgctaggtgctggggatggggatgtaaacgtctgcaatctacgagaacagacggctgcgaggagagagaggtcggcaaacgtagcgtttggatgagactgaaaggagcaaattcaagcgatgataagtcagaggtgcccgactgaacacagaaaagattgcctgcagattcagtgaacatgaacttactttgagctgtctccaaacatctgccgtagggacaccttgcttctcctgttcgattgggccgtgaggcactctgatctccgggccaccaagcatcaggacatccttgtccgacttctcggatgtcccgcattcgccttggtgacttccacaagcaccgggaaccccacagcagctgacttcgatcatctcgctcttcttctcctctttgacttgaattgctccgtccgctctgtccgcttcctcgatctcttcgtcttcgtccaatgtctcacagaatgcctttccgaatggatcgtcagcacatgcagcacagttcgagggatctcctgtacaactcggaagctcgaccacttcggttttgatgcctgatctatcgagtaagaccgctccgtctgaaacgaccgtacccgaagtgacggacacggaggttgcttcggtggaagaagaagtcgacgatgtaccagccacaatacccgaatcgatcgtccagatagatgtcgaagtcttcccctttggtttccgggcgatccgcagggccgaggtagtcgatgtatcaactccctcactaggctgcgaactactgttcggagaggacgaatccatatcgataaggagggagtccattcctgcgttaagccgttcacgttctttttgctcagcagcaatccgacagacacatgtatcgttctgggtgcagaagccacaagggacgatttggatctcggaggaagaggaggaagaacatgttgtcttgatcgtcttggtcgttgacgttgtgtttacatgacgaggtgttgaagagacggaggaaggagctgtagtcctcgtctgaccctcattgggaagagcggaaggttgagtgtggaaatggcccgtaggcaaagcttgtggcgacgactgggcggcgtagagcgacggggacaagaatgaaggagcttggagaggcggataggcataacgagggtgatatagttgagcttgctgctgctgctgcccaagtccgcttccgtttccatttgaagatgacgaatttgacgacaaagacgaaacggacgaggtcgaatgtccactcgtgtgctctggcttgtacgcgttcgtggagaccagaggagaggtttccgcactttcgggcgtgactggttcatccccaccgtcctcagtctcgggactctctcggtttctatctgacttatctgatcgttttcttttccccttaccctttccacctgtcatggatgacgtgctctctgattggggcgagtcagttgggtcacctccaagggacataaccagggatcgaagtcgagcattttcagatttgagtgtagtgttctcggccttaagcgctagagagactgtttggagagatatggccttctggacctcttgagcctcatctagttttaaatgtgaaaacgagagagagttgttagacacaaggagacacattggatgagtgtgctcatcgatttgactatctatatgaaatagtgcgaccaagtcccttttgcggaaacgatccacaagtaaagacatacattctttgatcttgttctctagctcttgaacatagtcttgttttctttctcgaaatgctattggaccaatccaaagttgatagatatcggtgtaggtgaatgaaccagggatcaagccgacaaccaccgagtcggtcattgtcatccgaaaaaaggataaggataaagacatatcaagagtttactttttgtcagtacatgatagggccatgatccgtatctttcaaatcaacaacgtatggagaaaaataagagagagagcgaacctctctgagcgtccctgttctgagcacctttgcccgtcggcttggcggcgggttccgatgcttttcgacctggccgaggacgaggtggaatcgtccactccttacttgcttttgcaaagactatggaagaaagtaagatagagaatttaggcagagatataaaacggatgaaatccatcgattgggtgtcaaacgaatgtaaaagatagacagtgagcaaactgttcagcagactgtatatctagcaccgttaagttcaaacgacggcaaggaaaaccccagaggaaaggagaggaaaactgactttttccacctgaagaggaagtatctctatctgaggctgagggtgccatgatatgagagcgagagtctgaacagaagtatgattcgatacaaagatgagagattgagagcaagagcaagctgtctagacaaccatgggatggatgggaatggataggaagagagcgtgtttgaaaaagaggccaatgagaagagtccgcaggcttacgcagcggatttatcagataactcgttgttttttaatattttatttttaatattttttacggtttaaaaagttccctttttttctcgtcattcttttcgttcattggatcagccagcagtcgttagcacgatgctgggtgtcgcaaagacagtacaagaaggcgaagagtacaaggcaggattccaacaagatagattcatacatcttcgacaaactagaaagagagcacagctttcattttctttctttacgcatcagtcacactaagcccggacacatcgggcatttctacaacgttcttcgccttgatcagcttggtgacctgcagagtaggggaagagaataactagtcagttggtaaacgattcacgttgccattaatccacacacggaaacacacgccggacatacctttccaatagcgatcgtcttgccttcctctcgaagggtgaatcgaccaagctgagcatagtccgtgaacttttcgatacagatcggctcggtagtctcaatcaatgcaatgatttgttgtcctgtggtcgagagaagagtttcgtaatatagtcataagacacaaaatcgaccgtctttcctaccttgagagcacagttaaactgaaacttaccaggcttggcaaaaggaggcggcttcttcgactttcgaccagtcttgggctcaaggtagtgaagcaaggactgtgagagaacatcaacggaatcataaacatcatttcatctgtccatccatccttcctttatgactcgacatgggaaaagacgcaagaaaactcacaatgatggtgacctcctcttggacagaatgagcgtggagaatgcacgagaatccagcagtgatgatgttcttggaatccatgatggccaactgggcctggaactgggttgctgtgttagcaggagcggcagggttgcagagtacaaaaccgggcgagacatcctcatccgtgatacccttgcatcggactcggatgttatctccacagtaagcagattcgagctcctcgttcgtctcgtcgtagaggtttgtcacttccactgacgtctgtcaaaccgaatgatcggtcatcagctaaaagtgctcacttcctcttcccattgagtactgggtgaatgtttagaacagaagaagctcaccctgttgggcatcaggatcaaagaatctccacggtaaatccgaccactttcaagctttccaacgagcatcgttcccaaatcgttgtacttctccgacactggcaacattaagggtccgttaacctttcggtcgggaacttgcatcttgtccaagaactgaagcaaagagacagaactgcaaaatccgattgttaattcgcagtttgacattgatctgtgatttacgaaaacacgcagacacgattgggaactatactcacgtgttccaggggcacacctccttggtgacctgctccttcatgttcgcaccagtgtaggcagacacaggaatgaacgttacgtcctttgggttaaagattcctttctttaagaacgaactgatctgacttttgataaaatcgaacctctcctgggaccactccaccgtagggtcatccatcttgttgacgacgacgatcaaccgactgacacctgccgtcttgacgagctgagcgtgctctcgggtctgcccacctttgtcgaaaccagcttcaaactctccctttcgggcggaaatgacctgagtggtttgaaaacaggtttaacgttgagacggagacatgcattgtgttttcagttcctactccatgagcgcataagaagcaagcacacgataggaaataaacataccaataaagcaacatcggcctgagcagcaccactgatcatgtgaggaacatacatcttgtgcccaggggcatcaaggatagtgtaccttcgaccagtcgtttcaaagtaggctctaccaacctcaacggtctttccctttgctctctcctgaggagtcgagtccaaagcccaggaaagataccaagactctcgaccggcctccttggcctccttctcaaacttctcaagcgttcgcttgtcaaccataccagtcaagtgaagtaactgaccacccatcgtggactttccagcatcgacgtgaccgatgaagacaatgttgagatgctccttggctagataagtccaacacaaagcccataagcgcaaacgcgacataagagaagagtagatgagcgaacggtcgaaaaggtgatcaaagatatggcatatagcccacacgcaccgttctcatccacggtctttccgccatacaagtcagtcaacgtgtccttcgccaaaagcttctcagcctcggccaacaccgcgtcggacgaagtttttgcgatctctctcgtgaagttgttgattggcttggccgctgaggcggcagccttcccctcctcgacaacagaagatgccggggtagtagctcccgaagcaggggcagacaccgcgacaggggtagcggccgttttaggagtagacgaaaccttaggagtcgaagcagctggggtagcagtcttggaagctgcagcacttccaccgccgagagagacgaccttggccgccggcttagcgccaccgagtgagagcgtaggagccttggtaggtgcctcggtagcctccttccgaacaaacggaacagttggtttagatccgcctagagagatggtcttgggaggaagggaagaaagctgctccgcggcagaaggagcggaaggctgagcagaagacggagccgacgaaggaggctggttggcgtatcgaggctggataggaggagggaatccgccagaagactgagcgggaggagcgttgtaagtgttttgactgtagcctcctccataacctccctgctggtatcctccttggtacccgccctgctggtagcccccaccgtatccaccctgctgaggatatcctccggactgagcgtaagcagctgccgggttgtaaggttgctgataagagttattgtatccctgctgagggtatccaccgccaccgggttgctgttgctgtccacctggctgctgctgctgctgttgagaccgaggaacaaaggcctgtccgggaacgaatgcctgtccaggaacaaagttgtacgctccagggttaaatccggacatgactagctagagactgaaagaaacggttgagatgatgatggtcaaaatagaatgaaaagaaggagaaaaaagaatgaaattgttgtcgccctcatcagcaacttaagagaccttagataagagcgttggataagtcccgtctaattcaaatacttgactcgtctctctctattacaccacactgataaagaaccacataagacgacagatgatgtgtcaaagggttcgaagagggaggagcttcctgagatcattctatcgatttaccagcaaatgttccagttatatccctttgttccttcccaattcttagccaatttacttcgccgacccccattattggtcttggtcttcggactcctgcgtctccatgctttaacgagaaatcttctcgggcccttcgttcatccagtcgggctttgagagcgagattgacgacgtgcgcttcatctactcgtttactcttccacacagtcagtgataagagatcgtgaatcccttccggtggcaagttccacaatgctctgtcgaaggtcttgttgtttggatccttgggtagattttttgggagctgaacatcatcaacgaggaggagaatacagtctcgatcccagacgagagagtcaaaaatgactttgtacgatggactggcagggtatggaatcatgcaaagatatctcgaccataaggcatcgatcggacgaggtgaacttttagccaaagagcgttgagttcgtgatggacgtgaagagagagaacaaggtggcttcgataaggtttcgggcgggagaaaagaataggaagcagtttcggtagatacttgcgtggttggagggatcttggactgaaggtggtgtagtaatattatacgaggttgggtcgcaagcctgttctcattggcgagccgtaaaactctttgaaggataccttcaagattcctcaattgaatgtcatgcagcgtttcacaaggttttttgttcagccgtttgatagaaggcgagacctgcctcgccggagatgatgatgataatgacggaggagagccgaacagctgaggatactgcaccatgtcatacgcagggcgagatgcacagacggataggtcgtcgagtgcgcgctggacgatgttttggataagcacgaccaagttcgtttgaagccagatagcaaagtactcaatcggtggtagcaaagctcgtcgtctgctatgagttgtagacaatggcttcgtcgattttgacatgtgccgatcgatgaactccctctattttggaatttcaagtgatatctttatcagtcgtctgacatctcagcaacgagaaagagaatatataaatgtacctggctgagcggagcattacagatcttttctatcaacaacatgtcatccctcctcttgagtttgtcaaatcgaagtctctgatcgagaatcagacgggaaatccgttcttgtgatgatgaaggccgtgatggtattggtgacttgtctttcagcggtctcggcttttctagatcaattcaaccaaaaaaaatcatgtctagttaagcttgatagggataagccggttacgatacaatttgcataggccaccttaccatgatgaggtagatcaggtcgtatcggaggaatcttctttctacttcttcttggtttcttaagcctgagcgactctttccggagcagatggcaggtcagaacgggtgacatcgcagggccattgatccaacacggtcaaatcaaaagaaagctcacgctttttgtgaaggctctatcgaggtggtcatgttgcaaacagagctactcatgagacgctgtggggtcgacagtcgtcggatcgccattgaacgggtatacatatatcgcgtggtgcatagctgatcgatgcaaactttagaggaagccatacggcagatacagtttgaagggctgactcaactccagtcgtctgcgatgaacctgtactcggtgtgattcctctccttctcgagctgatgatggttagaggtatgagcaaggtaaacatgaattagcaatctcgcaggtattttctccgacccactatcgaaatcaccaacaaccatcatcgtcatcagccgttcactctcgtcttgttgatcgatagatacatcccataagactcatcttcgtcttgtttcaactctgcatagaatccaataggttgatatgtctactccataccgccctccactctcctatgcccgtccgacgccaacgcctctcacctcagcctcccctacaccatactctcttccttcggctcttctgtttcggcctccatcccagcaaaacaattcatccatccagtctccactttcacgcccaagcactcctaccggaaacaatatctactatcagcaaagctctgcggcttcttccgtcactcccggcaatgctggcggcagtttgaatggagctggagccggaccggcagggaccatgagtgctcagcagaggtactactcaagacctccgaatagcaacttacagagtcagccatcattaggcgtggccaacaagacatgggatcgaacaatacccagtcaaagaaagaaagtagagaaagaacagccgccaggtccattcaataacgcccgtatgtcatcacgcttgaatcaaggttgctctgcttgcgtaaatctgaactttgatattgggtttctaatcattccgtgtacagtgagagggatgatgtatgcattcggagatgacccagaccctgcgaacgacacagttgcagtgatggaagatcttctgggtcattttgttcaggagctcgtacgtgtattcaagaatatccctcttcgatgtcgtccttaaggtttggtgtgaatcttacatatctttccttctcaatgtataacgactgcaactggatcgaatagtgcgcactccctcctccgccccaagtgattgcgacgtctaccacaaacgcgcgctctcagaagattactttccaacatattcggggaaacctatcgtcccatcctttgtccgctccgcttctctctcgactagacgaactggccgtcctacagaacgacatcaaatctgctcgaaaagcgatggatccagcggcgaacttgtttaaactcggagggaataaccaaggaccgggtggatctggaggaggaataggaccggcgagtggaccaggtggtgatgcagaggatgaagaagatgaggaggaggaggaggatggggttggtggtatcatcggtggcaagagaaagagaccgtctggtgtcggatcggccaaaaggaaggacagttcgcttgcgggagacatcgggtgcaagaaaaagaaaaagaaaagcaagactggtatggctagtccgtaaacagagaacgtatatacgtagatttgtttagaagcttcgccgtttgtaatcatattaaatgttgtacaagactcttcaagttttcctttgtttttctacgtgaatcatactctattatcgtgacagatgagagaacgcgcccattttattgatcaagaataagaaacccgaaagacaagataatattttgaaggaatcgaaaagaaagaatgtagctcttttcaagcctcgatcaatctgcccttgctgtctgccttctcctctttctcaagacccaggaattccctcccaccgccgactctgtaccagtaatcagtccccaacccaagagcgatcaaccctcccaaccacttgttgctcgcaaacgtcttccagcaactacttctactgtccaaatcgaccgtccggatctgccatgtcagatgagcagccgaacccaaaacggagatcgcgtagaaaggagcggaacatgaagcgagtaaaccggtgtaggcgagtaaagagacaaatgtggcggacataatggagatgattgggatggtttgtttgccaaagaggagcgcggtagattttacggcaactttgacgtcgtcgagtttgtcctgttgaggcgtgggtatacaatccaccagttcgaggtgattcagtcaaatttaatcaccttgtatctgacgtaggccgtcttggagagaagaagggaacaacagtagacgaagaagaacagagacaaacctgatgagcgtagatggtatcatacatgatcgtataaatggaacccccaacatagagagggagagcaacggcccagtccacagagcctgccacagctgaccatcctagaagaataccccagttgaaggccactcctttgtcatgcgtaggtgtgagaaactttctcagtaactcttgatagacaaggaacgaagagagtagcaatgaaacgaggggtacgaaccgagtacggattgaggccagtaggtgattctcttcatgaacggataaatgcccaccaaaagcaaagacgacgcgccaaggtagatgctgaaagtataaagtaaagacgtcagacccaataccaaaccataaaggaatgtgttgagaggctcacctatacatgttgagttgagtgaggactcctaatccaacagaaagctgtagaccgaggaacgcagtagcttgaaacagattgacatcacctgctgctaacggtctaagtctggttcgtgctgtaagacaaaacagcccatcatccgcatcaaaaccaatttcaccatgatgaatgaaacatttttcggaaaggaattaaactcaccaacagctttgtcaatccgcatatcccacatatcgttgatcgtgcagcccgctcctctcattaccactgcgcctagtccgaacaaggcggtataaaataatggggtcgacactggtagttcgttcatcgtcgacgccaagatgattgaccaagctattggaacagtgaatcatcccaaccaggaaacggttaacacctctgggacgttctatctagagaatgttcagaattgatcagacgtacaacagggccagaagagcaaccaagatccgataggtttgtcgaccctggctaagtatagataaggtctcgttccaactggcatcttgtcaacccaggtctttggcggaggaggctcctcaactacctcggggatgacaactgaggacggactggataaactagaatagatccttttgagttggacaggaggaagagctaatcgattagctctgtaggacagagaagatcgaggcggaagcgaaagagctgtggacgatctagccaaggatgtaggaatagaccgagtagtgtgagagagaacatgtcgagtaggaagtcgaaacatggctagatattcctttgctccttctaatgaatttatgtgtgagtgcctccgatgaacaagacagaacacagaatagatatctatgtgagtgatcagggtaaggaaggtctccgatgacaccacgtaaagaagtcaaatagaagagaaaaaaaaagaaaggaattgagatattactaagtcagccgcatcagaataaacagttctctctttcatggccaagtccgacatgatcaatcatttgtcgagatcgtcaaaacatgcatatgcacacatatgtacacgccaggatttataaagaacctatataaacaaacgctgatagaggtagatgaagatagctttaaatgcgcacacttggctaccgtcgtaggctatcatgatgaacagatttagctgagagaccagacgaggagatgcagagataagagagaaaatggttatagagataaatcttcggaaagaagagatgatatgtggtacaaaaatgcaaagaaaccccagaagagaaaaaagagcgaagtgatatcgtggcacaaaggaaaaaaagtcgatgggtgaatgataaagatgaaagttagatgagcgcatggttatgcctcttcctcatcaccgtgtctccttcttccaactaaaggcacagcctcgtatccctcggtctgaccacttcttctatccccagacagtattctgagcttggtcaaaagaccaagaatcacagacctcgtttgagtcgagacgagagtggcagaatctagagtgcttgataaggtcggatcgtaatttgattgggtataggaagtgctgagaattgagcttgagggtcttctccatgactgttgatatgatcagaaaatatatgcttagtctctcatcaaacgctacatggtctaatgcgaacaatgacagaaaaagaactgaccttgagagtcaaactgccacatacgacactgacactactcatcgccatcgccgctgctgccaacattggatgaaggtgaaagccccaggggagaaagacacccatcgctaggggtatcatcaggaagttgtagacacaagcaaaaaccaggttggcctttcaagcgaaacacgaaagcagaaacaaagagtcagacgtctcagtcaaggctaagtctgtgacaagagaaaactaacgaaccttgattctccgcacgatagcgcgagccaagccgagagcagcgacgacgtcaagtaaatcactcttcatcagaaccacgtcggctgcctcaatggcaattgatgttccagatgagagagcaattccaactgaggcggctactaaggctggagagtcattgattccgtctccaacctatttgtttacgttcaagagatggcctgggtcaacatctggaaagagaaatcttcaaacaacacccatgaaaaaagactaaacagaccatggcgattcctttgaatgtgggtgattcggcaaccaaatccttaacaattctggctttccccttcggactgacctctgcccagacgtctgtctccacatccattccgagttctttagccactgcattagcagtcgtgatcgaatctcctgtgaccatcgatactctgatacccatctgtctaagcgcttggattgcctgtatactggagggcttcaggttgtcgagtaaagacacggccaagcaaggggccggactcgaggtgctatcaaagtttaatggtctggttgatgtggaagcaataagagacacgaagatcacagtttgtccaagagaggcatgggaggtggtgaactctctcagaactctaggcagctcagcctcggcctccacggacaagtcttctttggagtctggttgagcgagtctcaatcgagattgggcaggcgattcctgaacgaagcttgctttcccgatctttatgatatattcctccgaatttgccgacgaatgtttcaccttcgcttggacaccttgaccggtaaaagactgaaagtcgagaactgtgctgtccaatggattctgtccaagtgagcgaagcatattccgaccatgagtagagatagcgagggctaaaggatgctcggatcgagcttgagcagcagacacgagggaaagaatagttgagcgagggagcgaattgaatgacgagagataactcaagttatcttctccgaatccagcattaggagatggttccagatttgcctcatcttgctgttgtacttctccaccaacccagcaaaggcctccgacgctcaacttccccatagtgactgttccagtcttgtcaagcaatactctttcaactccaaccatatcctctagtgcttttccgcccttgatcaagatcccgtttttggcacctacgcccgtaccgaccatgacagccgtaggagttgccagcccaagtgcacacggacaagctaccacaacgactgagattgcaagcttcattgcggttgacaaataagttgaaccctccttttggaagatcatcggtaggttgtgtctatccatgaagacgcatgatatgagcatccaaccaacgaatgtggtgagtgataggctaaccaccataggtacaaataccccggcgactcgatctgcgaactcttggattggcgccttgctcgtttgggcatcttcgaccattctgacaatctgggcgagtgccgtatctgaaccagcccgtgtcacctcaatatcagcagtaccaagtccgttgacggtaccaccgatgacagcgtcgcctacttgtttagtagaatgcatggcttcaccagtgaccatgctttcatcaatggtcgtacttccgcgaattaacaatccatcggcgggaatcttctcgccggggagaatcttcacaatatcgccgacctgaactagttcggtagcaatctttttctcgatcgagcattccttgtcggtatagatggtggccgaggaaggagtaagggccatgagatccgtcaatgcggccgaggtctttcccttcgcgaaattctcgagataacgtccgaacgagacaaaggtgataagcatggtggacgtgtcaaagaacgtctgtggtggtgtctctggaggagttgattgtatgcaggcgaaaaagatagtcatggtagagtagacgaatgacgatgtcgtggcgatgacaacaagagtatccatcgtggaagatctttggtgagaatagacaaagttaatttccatctgacttatcccagattgtttggataagttggaatgaaatcaacttaccggtgcttaagggctttccatgcgttgatatagaatctctgtgcgagaaatatctggacagggatggtcaacatcaattcgacgagcgtattaaggaacaagcccctccagactctcatctgaacaaagtccttgacgctttgcccacacatcggtagaatcataccaaacacaaacacaggtacagcgaagaacagactagtcttgaatgttcgcttccattcggcaatctctcgagtcttctgtaaactatccatctgtgccgagttgataccgtcggaaaagataacagcatcgaaagatagcgattgaatggagtctaccaggtctctaatcttgattatcgacgtcgtgtacgacaaagtaagcgtggaaggtgaggatgggtccaaaaatccggctttgagaacaccaggtaggcttaacaaggcattggtgaccaaagcaaagtctgtaggtgtctttagaccataaagctggacctataagtaaaagccaccgtacaaagtccagtcagcgtgtacaattatgacaatcaggcaaacgaacatggagctttggcaaggcctccaggatgagctacacccatattgtaaaacttgaagataaacttacattttggatggaaacggtcgatggcgggagagctactgcgtcaaacccaatgtccgagatctcttctacaattttgtcatcgtcccatccggctccatcaggtccaacccaactaggatcatattcgacgatacccctctcggcaagaagggctactttgacagaaataatccctggaagcttaatcacgcaagattcgatggatgcaacgcatgctccacatgtcctgtgattgatttggttgagaaaaaggagtatatcaagaagttgaaataaatgttgggtcagcattgcatccaatgcacgtacgttcctctgcgccatgtagcagaccaatcgtgtaaatgcacggtacacgctccaccattcaatgtctaagggaaaaaaaaactgtctttctacgaaactttctgccacaaaaaagcgcagatacaacttacattccttcaatcttgagttccactctgcctaaaagagattgactctctttgctgcctcccacactagagtcatcctctgcatgatcctcgtcttctgccagtctcacctgcttgtttgatgaagctcgagggctgagtaagctgaaggccgagccggtcggctgatgtgtgtatggtgagctagaggaggaggtcagagacaaagaacggtttggagaaaggaagtttggtagtctattccgaggcaaggatgaaaggatggaggagagcaccatggctggatgtgatatgaatgttgtgggtgacggggtttcagttgtttatcaatgctcaaatctgataatatcaatagacaagaaaggcgacgcttcagaatcttaagaaaatcattaaaaatcgcagaaattttgggaaaattactgaaatattgaacaaaattcatctgaaactcatcacgctggtttttgagtgtggtttctgtccctgctagctcgtaggtcagatcatgtcccaaagctctctgcaagacaacacagtgatcacagcggtggtggtggcaatgatggcggtggcacaggtggtggtatgggtggcaggtagtgtcaggtagtggcaaacatgacgatgtcgaagacgacgacgacgacggacaaagccataccatcgctacagacagagtcatctacagacacaacaagccatgaggagcaaaaggaaagcgcgagaaaggacgaggatgtacatgatacacaagacacaacacagatcgcagagcacatagtacagactacaggacacagaacgcagatcacagctctcctcgtctggcacgaagcaagccaggccgttcgtcggtgtgaaggatagagagagcgcgatgggatgcagcatggggaggaagagggcaggaacgaggacaggagcgggaatggaaacagagaggatagcgtcctgaacgactaggagcggcaattgacatcgagacatgacgttgcccgcccgtccacccagtgccttgtctttcaccgtctggcacataggtcagcagcaactgcaactgcaacgactcgaacaagccgttgcgtgaagcttagataagctgtctgacagcagctcagctcatccctattcagcaaacgcaaagactgcagaaacagacactatcaaacgagtcaaaaggtgaatccaacgctcagactcagccttgtcatataagaaagacgtcgtcaagtagaggtgctgaaagcgccaagacgcgcagtcatcgtcaaagtagcgactcgtatctgtccatgagatggtaataaccctaacgacaaagagtcaaaccaacatgctcaatttggatattcacttctcggataaatctactgttgttccaatgcgtgaagtcctttgagagcaaaacaatcatattcatactctaatagtgaatcgggtacatatgatggtagtagatgcgctctcaatcatttctttgcctcctttggtaaacaagcatcatcaccactctcctcttagtcagctagctagctagctaaccgaacgcaggaatatacgtcatccgcgcagccaatcattcgttcgtttgaactaaaacaaccgaatcgggttttagcgattttctgatcgaatctgttataacaggaaattcgttccgacatgaatcttttctcttcctttttcccatcacatacactcttcgattcatcgttcacaccaagtaacacatatacaaatatatttatcatggccgacccttctggaaccgcagcgtgagttattcttctctatctcagcacacaactgcttccatcagctaactctctctccgtcttggcacgtatcatcagtacaactgagagtggagtcactggaacttccgctacccaaggacttggaggaggaacaacttctacttctggaggagatttcttggataaaggtgttgattatgctgccaccaaatctggacacacccagtcccacggtaccgtcgagaagatctctgatggtattaggtctggtttcaagaagatgaccggcaaggatggtatgtcttgaatctaaacaaattatgcatctgatcgctcactagctaactcttgtctctttttcgttcagtccctattgctgataagacttaccaatagaaccctccattccggattactacatctagaacgcttttatatgcctcttttt

SEQ ID NO: 3219 - DNA, 42857 bp, Xanthophyllomyces dendrorhous
caagaacttgatttcgtttcaacatccgaatggaataaagaagaaagaccattatgtttgatcgtatgatccgcgatcatctcttcccatagaataagaggtcaagccttacgtaacatcttactcaaggatcctagacaattatcatatccacatcttcatctgagcgggtgccagcgaggaaacctctgatccagtctttgcaaaacaaaggctcgaccgttaagtcggttgtgttgaataacatcattcttgtttcacgtatgtgttttaaattactaagagagggaagaaaaaatagggcaaaaatgatattggatgggaagaaatgacaggagggagaaaaatagagacgagaaagaggagagatgggcgtgattgcctatgccgggtgtcaatgccagtgtttaagtatggagattcaacaagaaaatgggatgatgatgatgatgatgcaaaagtgaaaaaccaaaacctgcaaagaagaaagagacaactctcctagatcaatcccttctcctagcggacctcttcttctccctctcttcattctcctccacaccttccatcgatccaacgtctcttccgacaccaacagccttgactggccgtcttgagccctttctccttcctccgcctacggaacccgtgctggctatggttgtcgtgatatctcctacatcgtccatccctccactacctgcactcgcactcgccccactcgtccctaccaccatcggcccagcaccagtggcagccatcatagccgcatatcgtctcttcgaccctgtgggttctcgctctccggttgatcccccatttccgcccgcgcccacgcctacttgatgtgggatagatactccgctgaaaataccattggctgtgggtccactcatgctcacgatcccagctggagggctatcgactgtagaagacagtgcttcagaaaatgggtcggatggtaggccaaacgtgaaactcggtttcgacggaggaaataaaatcgggctcgccgcttttggtgaaggaaacgagcttgattgagcatccgtcaatgttgactctggagcgaatgccgttgtcgttgttgatgattgtggagccggcgggaaattagcaggggtcgttgatctggaagacagtgacagtgacgtcggtcgaggagcgagaggggaagaatggaccatggggttcagcgatgctgatggagcggagttggtatcgacggtgatagatgatgcttgacgttgcttaggaggaaaaacaggtgacaaagatgaagaagagataaaggaaggtgatgacgactgtggcagaggtttgttttgcagtgtctggaacggggggtgagtggaagaagtagagggtgtttcttcagatggacggacggaggatggtcgagtcggaggagggacagagaaagatgtccgatcagccaagttactggtcgacaacataggcctgtctgttttcccggcggatagccgagaggccggcagaaagttcgattgttgttcagatcgagcaggagcgacagaattgcagaaggctgacgaggaggatgaagaagaggcgataggttggtcgcctgccgatccggtcgaagaagaaccatcggatgtgtttacaggaccactagctggattagtaagcggtacaggcctcatgttgattggagcagaaccggtccgtttcattgaggacgaagcgatcaattgagtgaatcgattgttggcgctacccgaagacccactgggcgcaccgtttggatgagatcctgacttcgacatgacgccaggtccctggcttcccattctgtccccaaacgtttccctaggtttattggacgaattgtatgccgacccggctgctgctgctccgtccccaatatcatcctcattgacgccgtcctggtcttcttcctctaaccggattgtttcctgccttgcttccacccaatccattattcgaccgattgtcatctcgggtccaccaccaccgagagcaccatcgttggctgggtgagaggctgacaagccatgttgaatcatctgaagaacgtcggcgaggcatgtggagtaacctgcagagtatgcacgctgtcaagtttgttgatgaaagagcaggcagatgggaagaagtgtaagtgtgagggttaaaatcaaaatggaaggcctcgagcataagctcagagcgtactagagccgaacacaaacctttgaggttgacagcgaagatttatacaacagactgatgctcaaagcggcggctgttcatgagtcgaaattgaatcaatcgacatgaatcatagtcgagcaaaaatgtcaattcaaccacattcattgcattaggagaagaactcattgactgaattcagctatggagaaaccagcgtacccctaaacttttccatcagatccttctcggcccttgtgagctttgtggacgtctgaagagacgatgccaatgaggagaggtccatatttgtgtcctctatttatcggaagaaagggtgaaatcagaagcaaacaagagctgtatatgaatcctatgcttcagtgcagacgttgggagtagtgtcgaacgattgatagccaagtggctatgagaatgaatgtggtagagttgatgagagagaagaacaaagatagcagaatggagagaaagtgttcaaaaggagttgacaggggtttttcgagaaggcgtaacgaacgtaaccaggagactcgctcgaatgatgaccaacatctctcacacttgatccacctggtcgtaggatattatatatcggcagacaaagtgaaccagaagagggagtgggaagatcatacatggcatagaacaaatcgcagatcaagctgatacagaaagacgaccaaggagaagtgggctgaagaagaattctgatgtaaatgatagcttccatcgacgacgttcggaagtctctatgaaggcacgactatctattcctttctcgtgctctaacaacgactatcatgtataccgatagccttatgaaatcagcgagcatggatacacaccatctaacaggccgaggccgttctgagatggatcatatgaggagaggagtctatcagatagggtatccgcgctggtacttctggtcatcatgctatctcgcatcatcattgctttacttataagcagaccaagaataaacattcagatgcttcagaacccgacatgtgctttctggacactgtttgcgcgctcgaccatcgcctggcttcatctgtgtgcgaagcaatcatttgaacctgtcgttatcagttattcaagtttttttttcaaggacttcgctacccctatcatcatcttctttgtcactcctcctctatattttgtgagcgtgtctgtttcaagaccgatccgatgtacacgctttgtcacagatagatccagagctgctatgaagcttgacggatggtagcttgacgaatgaagaacatcacgataccggacttggttacaaacacgcattatcggtgcttcccgccgataaacaccattgacgtgctttctcgtttttcacttgccgaagatatatcaacgcacttatcgttcaattgagttatctatcttcttcttttggttttcttcacttttctcctactctcatcctcactctcatcctcactcatatcttaaatcacaaacacatacatccgggggtgtatgctcactagatcagttcaatcgttctttatcaatcgctcacattatcttcaaacgcgcgtctttcatagatcgtcaaacgcactaatgactatgacagctgaaaacaaggcgactgaggtcgaagtcaagaacccaagaatcaaagtctcttcttctcttaaagcaggaggatgcgagaagttggatgtctggtccattttctcgtacgtgttctgttcattcttctgtagactccctaccatcatctttgctctcccttttttctcgaatcgctcaaggatggcttgaaagttgcttgaaagcttatcgacctcgttcgcttatcaacctccccgttctctgcctgattctcgcttctctcatcgcaaatatatcagtccatcccagatgcccaaagatacgatcaacctcggccaaggggtgagcaccttcttgctcagatgctatcagcattgccttctgacattttgaccattctatctcgttatcaattcgatgatcgaacaaagttcatgtcatgggcccctcccgactttctcaagaaagcggccgaagacatcgtcgagaatgatgtgatggctcatcattactctcctgctcgaggtcgtccatccctcagacaggctatctccgaccattactcctctgatttccagcgccagctgaaccctgaaaccgaaatcctcgtcaccgccggcgcgaacgaaggcatgtacgccacgcttctcgcgtttctcaatcaaggagacgaagtcatttgcatcgaaccattctttgaccaatataccgcgagcatcatcttcaatggaggaaaaccggtgtacgtgccgttgcacccacccaaagagcaagcgaacgctgagtctggacctggtaaagtcagtcaaggatcggactggaccgtcgactttgatgaacttcggtaagttgttatcgtctctctcctcttgtgaggtactatcccgagtactaaacaagtttttttaatcgaaaccaaattatgtagtgcggccatcactccgaaaacgaaagtcttgatcatcaacacgccccacaaccctgtcggcaaggtattcactaggcaagagctcgagcagtttggtgcgctcgctaaagaattcaacttcctgatcctctcggacgaagtagttcgttcctctcgttctttcttgctcgttcctccttccttaaaacaagagtgctgacatctttttttcttttttgtatcatctcacgcgcttgaatagtatgattgtttgactttcgatgagaacgagcatgtgaggatagcaaacttgcccggaatgtgggaacgaactatcactgttggatcagccggaagtaagcttgcctcgttctctctttgtcttttcgtacggacctttttattcttcaacgtcggcttaccaattctgatgggacgttctatcaatgtgttgtttgataagagtcctttgctgcaaccggttggagaattggtaagcacatcttctcggatctttcgctcagctttgcattggtagagtcattctctgatcgctgttgccctctctatttatcaggatggttgatcggtccggagcacttgattacaccggcgttggccgcttcaacccgaattatcttctgcgttaacggacctcttcgtctgtcttctcttctttccgatctctcgtgtatgctgattaccctcgtctgaactttctctttctctttgatatacacagaggaagcgactgccaaaggtttggctcttgcaaagacacacagatttttcgaaacccaacgggccgaatacgccgcgaggagaaaagtccttaccgatatcttcgatcagctaggtcttccgtacactatgccccaaggagcgtactttatcttggttgaccttggacggttcaagtggccggagaattatgttttcccggactatctcgaagagcgtggtcgagatttcaagtatgttgccttcctcttctgtctgctgttctatcgtctccttgtcttgtatgatttccgaccaagccagaattcatatgtgtgtttttcttttctttctcatttacccttacagagtgtgttggttccttggtcaagaactaggcgttgttgccatcccgccttcggagttttacactccggatcatgttcatatcggagagcgtttcgctaggttcgctttcgtgagtattcttttctagttcttcgtgtcttttgcttctactatctttcctcttcttcgcatactgacactgttcctgatcatgatgctgtctttgtatttaatagtgcaaggatatcgacacgctcaaagctgctggagttcgacttcagaagatcacccagtaccttcacgattgagatagatcactagcatctgtggtgttactaaactttcttgaacatacagttcccgtttgaattcttatgataaaatgtcgtactatgataactggctttggcgtactattgctgtagactctgatgtcgatacagaagggaagtggataataaccaagatgaacagaagcaaagatggatcgacagatagcggatttataactgtactgaaaagatactctaagctgtccggtcggctgccagcaattgctccagccatctggcttctttctccatgtcttccaaacttctcggaggtcgattttcatcggcgtccactttgatactacccgccttcttccttggccgatcttctccattggagcgggctagagattgatggtcgtccaggaggttatcttctgctagttctagcacgggatatacctcgtcattctccccgttgaaatccgttggcttccggggcaacacgtgtacgtgtacgtgtggaacggattgacctgctgctggaccatctctgttattcgccgtgtcgatttcatcgtataaagagaaagaaaagaaaagaaaaagaagagacagggaattagacgatcaatctccaagtacgtgcgcgcgagaaagaagtacacggagacatagcagtacatactgggtggagattgtcagtgcttctcctccataagcgcgttcaatcacggtcccgatcttttgaacggccagatagagatcggcaatctcctcggccgatagatcagccactcgaggaactactctgagaggacaaatcagaacgtctaggtagaacgatgggaagcatcggtaagttattgtgaatcagatgacacaatcgcaacaagagcagccaaagggtcgtatatagtcgacttacggccaggcaagattggcttcaggttgaccaaaccaaaagaaagtttcgatcggtaaaacacctgtgaggttacctgtattagatagaattgattgttatccatacgatggcgaatatgaaagataaagaaggagatagatactaggttagtccggatgaactaacaacgaattagaaaagacgtgccgaaagatgaagagctcaacttgaaggtagaaaagaaaatgtctgaaaccggcgacataggttctgtagtttccatgcaaggatgtgtgcgtgtatcaacgagagaaggagccttaagctgatcgttccctatccgatgtatctgagtatgtttgtatggtcaaagagatggagagacgacggagagaaaggaagagtcgggagtgacccggctgaggctgagatgagtctgtgtagacttggtatgagcctcacatcagcctcggactgaaatacccgacggagacttctatctccatcaaacagcatacgtccatcccgtccccttctcatccatagtcctcgtcctctctcctttctcttcccttcttgttccctctcttctgattcatactctgtactagacgcacagtcatacagaatcaagatacccatgtctagctctcaagataaggaggagcctatggacgacgttcccctcggagacgtgagattggccggggaagaaacgcctggtacacccgttaaggatgatgttcgagcgatggcacattcttcgtctctcgattcagccatcactcaatctaacgaatcaacatctatagacacttcggaacctgccgaaacacccaaatcgagtgaggtgaaccaactggagaaccctgttgaacaactttcatctgaatcagtcgagatcaaagacaacatagatgcgatggacccgatagtcttgaacgccaaggacgcgccttcaaaggaatcgtctgtttcgacaaccttttcaaaagctcctttgcctccttctccctctacttccgttcctccgtctcctccatcaaaatcatcggtcactcacgcaaacggttcatctaaagagacaacgcctgtggctgcgcccacgcccaaaccgctctcggccgttcaaaatcaagaatcaacccccccgaccccatctcgaaccccacagatctctcatcgaagctcagtttcttcaatgcattcccaaaagagctctctttcaaccttgccatcaacctcgctctcttcgatccatctgctctccgccatgtcgaccatggccgcctctaaggacgccaagcgatctcaaccccttcagaaagcactggcaacagcactggatgccatcaagaagagtggcgagtcaggaggagcagtaccggttgaacaaagcgtcatcttagagcctctcaggctggcttgtgagactaagagcgcgatgctgcagagtactgcattggattgtatctccaagttggtttctcatggcttcttccatggggagaaagatgatggagatgtcgagcaggatgagtcaagtgacaagtccgagttacctacttcagcttctgcgtctcctgcgattcacttggctgacgagctgacgttaatcatcacgtcgacctacactgagtccacccctgacacggtagccctccagatcgtcaaatctctcttagcgctcgtcctgtcctcatcggtacctgttcatcactcatcactgctgaaagccgtcagaacggtgtacaacatcttcctcctgtcatctgatccaatcaatcagatggtcgcccagggaggccttactcagatggttcaccacgtttttggaaggatcaagattcctacggcaccaccagcttcgtgggtgtccaacggaggttctactggaagaagcacacccggtctaggcctctccagtaccgggtcgaggcggaaattggatcagccgaccgtagggctcggtatatcagagtctggcgtagaagcgaaagatagcaagatcgagaccccccagacatctgtcgacgatacaaaggagacgaacggagacaaggtcgtaacttcgtccccaactgtggtccaagtcgaaggaggactgaagtctcctgctggggagactcctaaaataacgttgttagtaatctcatcgcgtcgcgctgcttttcttctacagccttttggaaatgagtaaaatcgtgtgctgatcacttctatcaccgggtaatataacttaagatcgacgtactttccctccgattcgacagctgatttggattcgtcggcggcggtgaaccatattcttaattcagctggtaccgccacgccctcaggcgagcgacctagactgaactctgcgtctgcacctcctcaagcgtctgctgactcaagaggagagggagggggaggagaagaaggagatgaggatccatttccgcttacccgacaggagaggttcatcaaggatgcgtttttgattttcagggcgctttgcacattgacaatgaagccattagaaagagaagggtaaatcttgtttctttttcctctgctctaaacttaattgtagcaaagtccatcgaactaaatgagtacaacctgcgtttaatgccgtatcaaattctctccagggacctcaaaactcatgggatgcgatccaagcttctagcccttcatctgatcctcacgatcgttcagtcccatttggccctcttcgcttcaccttatgtcttcattccttcgtcctcagcgactcgatcaactttcgtgcagaccaccaaaaagtacctctgcttgagtctcatcagaaacgctacgagctcagtatcccaagtgtttgaactctgttccgaaatcttttggaacgtcctgaagggattgagaggaaagatgaagaaagagatcgaggtccttttgaacgaaattttcctttccattcttcagctacctaccttcacactcaagcaaaagtccactgttcttcatgtcttcctccggctagcccaagacccacaggcccttgtcgagatctacttgaactacgattgcgaccgaatggccatcttgaacgtatacgagcagctcatggagattatcgccaagattgccggtacccacttcgctccgccttctgctaaagaaaaggagcaagaactcaacggttctagtgttggaggtgtcggtcgaaatgaaggcggtcggacgcgtggaaccgagatggggccgatcatccctcccagtctcacaacgcatgcaatgagcacctctggtggaacaccttcatcatcatatcaaggccacggcccgtccgattcggtctctactctaagttcggccactggatcgacagtgactacgatgtcttcgtgggcgcatcttccggcggaggtcaagttgagaagacaagctttggaatgcttggtaactgttctgagatcgttagttcaatggggaacgagtgcatctatcacaaagatagtcgggtcgggtctgacggttgaaggcgagaacgcaggacgagagagtgaggacggagggagagacggaggagaagcactaggaggaaggcaattctcatcactgggagaaaagggggatgatccagagaccttcgagaacgcgaagcaaaggaagacgacattgatggaaggtattaaaaagttcaacttcaagccgaagaaggtattatttgttctccgaaatattctgctgtgatcgtaaatggcgcgcatgtgtacaatatctgaacggtgattaatattgtttttgttaacgaatttgaatcaacagggaatccaattcttgatcgagcaaggatttatccgtagcaaggctcctcaagatatcgctcgatttcttctacaggctgatgggctaagtaaagcgatgatcggggagtatatgggtgaagggtatgcatatgttttgtctttccgttactcttgttttgggactgattctcaatcctctctggccaatgttttggggaaatatagagatgaggagaacgtcgccatcatgcactgcttcgtcgatatgctggatttccgcaacatgaaatttgttgatgccgtccggacgttccttcagtctttccgtcttcctggagaatctcagaagatcgatcgatatgtgttgaagtttgccgagcgatacatcgccggcaatgcggtcactgaatttgccaatgctgatacagcatacattcttgcgttctccgtcattatgctcaatacggacgcgcacaacaagaacctcaaaggccgacgaatgacaaaagaagagtttctgcggaacaacagaggaatcaacgatggacaaaacctgcctgatgcattcttggaggatatcttcaacgagattcagacgaacgagatcaaaatgaaggacgaggttgaagtgcctcaagtcatggttgcgcctgggttggcaaacacattggccaacgttggaagggatatccagagggaggcatatgtgttgcagtctgaaggaatgtcgaaccggactgaggtgggacttgttttgtattgaccttttatattgtctctgttcgctgacagatacctttcttcaacatactatctaggctttgttcaagaccatgcttcgacaacaacggcaaggcggtcgtcaaaacgagcagtattatagtgcttcccacttggagcacgtccggcccatgtttgaagtcgcttggatgcctgtcttggcggccctctctggtcctattcaagaaactgacgaagtggatgtagtagatctttgccttgaaggtttcaagcatgccattcgagttgcttgtttcttcgacctggagatcccgagaaaagcatttgtcagcacgttgacgaagttcacgtatttgaataacctgggagagatgaaggcaaagaacgttgaggctattaagacgcttctggagatcgcggtaaccgagggaaactacttaaaatcatcttggagagacgtgttggtgtgtgtcagtcaactggaaaggatgcagcttatctcgaacggtattgataccccagacatcggtagaagacagtaagaattgtccaatcttgcatacctcttagacgttgatcgtttgtgcttatttgttcaaccttatctaatagatctttggcgaagaaagggtctcgtcggggacctggggaagacgtcgccagcgaaagtcgatcagctcaagtcactgtcgcggccgatatggtattttcctcaacgaagcatctttctggagtgagcaaaacatgtttcttaattacaaacacaatgtttggtgagctgatcaagttgcttctggtcgtttagtcggcgatcgtagagttcgtacaggctttgagcgaggtctcttgggaagagattcagtcttccagtgcttcccatcagcctaggttattcagtttacagaaattggttgagatctcgtattacaacatggctcgtatccgtttggagtggtcgggtatatggcagatccttggagagcatttcaaccaggtaaacttgaatcaaacgtgctcaatctcttgaggacatcatttgctaatctgctgtttctgcgggttgaatcaggtttgttgccacaacaacccgaatgtcagcttcttcgctctagatgctttacgtcagcttgctatgcgattcttggagaaagatgagctgtcacatttccaattccaaaaggactttttgaagccttttgagtacacgatgattcacaacaccaactcagatgctcgagatatggtcagtgttttgagctcgttatgagaatacctcaatgactggtatagctaatgtgtgtcttctttcttactcggatccacaggtcttgcaatgcttccaacagatgctacaggccagagtcgggaacatgcgatccggttggcgaacaatgtttggcgtcttttctgctgcctctcgagtcctcactggtatgaatcctaagtttccatttctgtgaaaagagacatgccttaactaacctgacgagattttcatgatcacaaactcaacagaacgtgtcgcaacttatgcatttgagctggttcagcgagtgaataaggagcatttctcccatgtcgttcgatacggcgcgtttgccgatttaactgtgtgcttgaccgacttttgcaaagtcagcaagttccagaagatatctcttcaggcagtggagatccttcgaggtgttgttcctgcaatgctttcatcctcggactgcgctctcagcacgcaagtggactactcagggtataacggagaaccaaaggccttggaagtaccgccaatcaatgacccgatggtcaagttctggttccctcttttatttgcgttctacgatgttgtgatgaacggcgaagatcttgaggtccgaagagtgtacgtaccattcaaatttcgcctcttcaacataattgaatgaacaaagtctgacttacagatctgtgttgccatacaccagagcacttgattctttgttcgatacactggccacccatggaaagaccttccggcctgatttctgggacagtgtctgccaacaggttctcttccccatcttcgccccacttcgtgctggacctatgcaggaggatatgagtttctgggtttcgactactatgcttacggctcttcgaaagttgattgacctgtacacattgttctttgagatcttggaacgattcctcgatccactgcttgagctcttgtgcttctgcattgaccaaggtaagaccttcattcattgaagatgatacgttcgagatttgctcgcaggctaaatttcaagcacaattgactcttctgttcttctatactcgtagaaaatgacacgttagctcgtataggaaccacctgtttccagcagctgttggaaagcaatgtgaagaaactcagtcctgcaaagtgggaaagaattgtctcggcctttgttcaactgttccagactactttggcacacatgttgtttgacccgaatcttcggtccgaaaacgaggtagccgattctccccaatacggtaagtttcgcatgcccttttggcagctcttactcacaactaaaattatattcatccttgccctatgagtatcagcctctaccccaacaactcctgagcaacaaacaacccagcagcaggatcaaataaccggaatctcagctaatgaccgacgtcgaatattccgccagatcattcggaaatgcgtgcttcagttgctcctaattgagacgacgcatgaactccttcagaacgatgaagtgtatcagacaatcccggctgtacaccttcttcgtttcttagaggttcttgatgatagttatcagtttgcccgaaagttcaatgccgataaagatctaagaatggctctttggaaagttggtacgtgctatttctcatctccgttgctgctatcgtattgagcttatacgcgatattttcatgttcactcatgtatctcgggaacataggtttcatgaaacagcttcctaatcttctcaaacaagaatcgagtagtgcttccacattggtcaacaacttgatcaggatgtacaacgactcgagaacagaccatcaagcctctagggaaggtgttttgattaagtttgttccgtgcgtagccttctctctctgtatgcaatacctaatttgaatattcactgagccagctccaaaatacacatacatgcagattgagtctggatattattcaagattttaatcaactagaaccagagactcaagcacgtcatattgctgcctggagccctgtggtttgcgagattcttcagggttactgctcctttgacgacgaaactgttcgtatcggctttcctctgttttcaacttactttcatgaaatcagataattcatcacatgacttatcacaaatatcatctctggttctgtaacagttcaatgcgaacctgtcggcactatatccgctagtcgctgaagttcttgcgcgagaaaatgctccagaagttagggagtcaatcagagctgtgttggtcaaggttggacgaacgaaaggaatttgttgattgaccacaaatggaagagcgaagcagaatgatcgtaaaacagacgacagaaatctggtctctgtttatttgctctcgaggttgaatgtttcgtcataaagtcgttaaagagatcatcggtcttatggatttttgttgttttgtctgtttgaatttagttctttttctttccttcatcttggtttctttttatctgccttacatgcttggctactccttcacttgatttttttttaaattgcgcatatgactttcctttcacgaacatgttgattcacatccttcacaacttgttcctcgaaggtatcgtgccttacaaaacgcgcaaggtctatcatcttgtaataaaatgagaggaaagcgatatcattcatcgctaccgatggtctattctgctcgatgattcaacattttgcattgacttttgcagttgatgccttgttcggacgcacagcctcgtaagttgtgttaaaaacccaatcccctattgatatttccccaagaaatcagagcgtttagtacaggctaaaatgtgaagtctgcttgaattctattgtatgtacttacaaaatttggatgtcaccccgaaccctaattctgtatatcccagtgcggggtgatacagcaaaagatgatagtgtcaggttacagacaccgatacatcggtaggtcatttacatctgagggacgaaccataatttttataatgatgttcaagatgatactttcgttgtcggtcaaagtagccagtcatctgtatatgatgagatctatagagatcaatgtcaacacaaatcaggttgttttgagcattgcattttaccatttatggacagctagtgaggctcccaagagaatgtatgaaagacagaactcacgcatagtggaagcaatcatagcagacatctaatttatcgatacccagaaggaagaaacagtatcgtcatgtcttatccttgagtacaaccgctcatgaaggaaagaatgccaaaactaacagccaaagaaagcgccggcgatgattccccaagcgcctgctccgtctccccaagcgatgatcgtatgagcaagtgttgtcattgggagctgaagagtgaagaaccttcgtatttgaacaagaccaagatcagcatacccgtcatctttttgtctttagagccagaaggaagtgaacgaacatcacaggaggcataactaatcgatatgggtccatcctttatggacaccaattcaaagacaatatgagagagagaggatgagcaacacatatatcatgaatcagaatgagcaaagtagtgttgactatccgagtagggaagcgaagtgagatcagaaagatcgacgaacgggaggtagtgatgtacgccatgcatgaggaaatggatagtaaacgccttagagtttgatggcagaagttcgtccaaatggaaaaggacttccgaaagaagtgggatgaaagatttagtctgtgatgcaggtagttcgaattacgtagaaagagaaagtagatgctcacatcgatgaaacacgtattccaacaaagtccagattactccacctagtcccaggcagatcgtcgatttattcaatgcgcgatcacttacgtgaggcgctgccacgcgtccagtgtcacgcaagtcatcataagcgttgtcgaagatagatcgggcggtaagatgaagatgaggatttgaaaattgaactgccgagacataggctaggaacattgctatgggtagccagatcagagggacgatgaaccagtacgtctttgtgaagacctatttcagaaactttgcgcgtcagaattgaatccgacaagatgatacgtctttttcttaaatcgcatattgaagaaactgtaactgacttcgagataagctggtccaaagagcaaagcagaacgaggaagatggcgcggttgatgaacttgagatagatagaatgccttgctggatgatcaacgccaaacatcgatatatctgatgagccaggaatggagaagagcaatggcgaagttcactgcaaaattcaagaaagacgaacctcatcttggcgttccaaagttgtggaagtaaagctttattgaggtctaagaattttgattgtttgaagtcatgagccacatcggtatcctctggcacaaacccatcaggtgccacccagtcttgagtccgacgcatgacaagtccagaggaagagagagaatgaatcatctgatgtcaaatgaagagaagagaaatcagagtcgctcaccaggatcaacggttgtctgaagatcttccatcatctcccaagccgcctcagagtgttcatgcccaccgctggctctcatcgcctccgtcacatcctgtccttccaaagccttaatacactccgctcctccaggatggtatgccaagaaacttgaaatggagaggagcggttagcgctgaacaatgatcaacgatgttgcgaatgtatagtagagtagagtcgttctaaccttgagacgtcgtatcgttttccgttgtggtgtaccaacagagcgggcattgcaaatgtcgaattttctttttttgtggttatattactgttgttgtcgaacttcggatgagagtaagagtatacacaacattggttgaagaaaggcagcttccgtttgaggtaaggtgggaattaagaagaatgtataatgacaacagaccgaaggtatcagaagactgacgaatgtcaagtggaacggaggaaggctctcgggaaaagttgctgatcctctattctgatacggacataaagaccaccgtcagttgatggtttagtaaatcgatgatggtcacacatgtgtatgtccatgaaatgaatgatcgaaggtctatgtcgaggctttcgagagcttagtgttgggattaattcttttaagaagtattagacgaaacaagacagtttgaacggggaaaaggggtaattctgtttcagctggtatctgatatcgtaatcgtcatatctgtatcggccgaatcgtttttctttctgtacttctttctggatcctataccggttttcaactgttccgatcctacgtttcattcatggacaggtttgaagcctttcagtttctttcgaatctctgaacgatagatgaatgtatatatctcttttatgagacaaaagtgttgagagggctggtgatattaaaatctctcaaggtcttttgaatccgggaggaaagacctgccgagcgttgatgtttatcctgggagaccaatccatactagtcttcagcctatggaagagcacattgacacgatatttagttttccctctcttacctagttgtctccatataacgacccagatcttcgtcccatgatgggctcacttggtcttctggcaaggaaggttttagatgtgcaggaagtgtgtcatctagtatcctcggaacacctgatattgcgaaagtaaaatcaagcattctctatttcaactgaccgtttcttgtcaagatgctagaagcaatgagaaacgaaccatgatacgctcttctcccgtgtccgctgagaacgacaacgtcacctgaacgaagcagtattggcaaaggaggggtgtctctggaagacgttcctaatagaaatactgcacttagacctaaactgtagagagaaataagagaagagaaagagttagtagaccgtcttgagaattgagatattaaccagtgatgggtgctgatgaactgacgaaaccgacacaagaggtcgatgagcgtccagttctgagcgatctacatgagccatcaatgtatcctgaattaaatagacaacaaaagatgtatcagaatcatgcacatcgcccatcattcttagacgtagacaacttacatcgggctggtaaaaatttatgatccccgcgtcgggttcttgagattcaaacgatttgaaacaagatgagtcggtacgcagatgtttgccccaagcgaagtcttattgtcgattatgtaggtacgaactgtagtcattccattgctcccatttgaccctttctagttccattccattctcgtccttggatgaaggcgtgccatctacgccgagagatccgtaaaccagagaccaatcaatgtccttagaaacgatctgtcgagatatcatatcaatatcatccgggaatggtatgggagtatcaaagtcgtaagattttgaagtccactgaggtgtacattggatatacagggatatgttggattcaggtcacattcgttttgggcacaacaaaaactagatatatgaggatgtattttggactcacatcataaaatagcccaatgttcgtccaccggagttctcggatgagcttgctaatcggtttcggtcggactgtcttgctaggctctacaggtagaatttctctcttgccgtcggaggcgaccgtgtttagaaagtcctcacccggtaagttctctatgagcgttctggtcggtggtattctgacaaacttttgctttgatccttcttccgaggaactgtcatcctcgagagacgaagcgcgcgtgggaactaatggatcctctggcggatgtgaatgtaaagaggaagtgtagagagaccataatgaggaagagggcgttttacagccgtcatccgagaggggggacgaagggaaaagaggagacggaggtaggtgaaagtgagtatctagatttgtcttattcggaggttgcgtatggatttggaggcaggacttgacaagaagccgttgccgttctggagagaaatacccaggaaggatgaccaggcctgaaaagttgttcagactagaaatatcagtagcaggtaagttatcaagctggttcaagagacgttcagaaaaacgaaccaggcatcccgacaacagcccaagcgtccacttttccctttccaacagacacacattctacatcttcccttcttgcctccgtccagccagcttggtctagatccccaggctggtgtcgcgtagaatctagcaaccgcctaggatcaaacacgtcttccaggctgggtcggaagatcgtttttggtcgtcggtttgacgatttctttcgaccacaaggagaaggatcggatcgagctttgaagtgtttttcggacagcctgaacggagtggacatagttgctatatttgtctttgtgcaccctcgaagagccatgcagaagaagactagtgagtgcttgatggcagtagcagtgtagtttgaaaatggactataaaatcgattatagtttcttgtagtcgcctgtagaaaagccctaatcagctctaaactactctccacgaacattcgtttatccatcccatcgagaacgaccatcacccgttttcattgtttaccagacaagaacaaaggagaggtctcaaaaacagtccgatgtcggttccatcgttatcaacatccaagcttagcgctctatcttcgtcgacgcttcctcttgttttggagcgtcaacgatccatctccatcggtcttcaaccgccagctttcacagaggctaccatcctcaagaatctcaatcttatccaacaaggtctccaggctatccattttcagtcttccacagcaccggtctctgactcaaaaggcctgagagatggactcgacagattgctgggtctgatggagcaggaccctgcaggcaaggagaaggttatttcgatacgcgaattcttaacgtaagttccgtacttgtttctttttgttttccaagagagccatttgaagcgtttcgatggcgaacatgctgagtccgatgactgaagtaccatatatatcttctattcatctgtccgatgaatggtctcgacagtgagcttgcaacgccacttcccagcgtagcttctacaagacctgcttctccgaccatgcctgcggcccaccttcccaggacgaacgagccagttttcggcgagtctaagccacaatccaacaagccttactcatcttatagagatgaagaagatgaggagagttcgccgtttgatgaaccgtacagggatgattcagaggtcatgatgcagcaaagggagatgatgagtggtttgttttggtcttatgcactcatctacttatcataacgattgatgcaaataggctgactcgctattctctgttttctgaactctactccgtctttatctatcgcagatcaagatgcccgtctcgctcagctctcgacatccatcaatcgtcaacatcatctttctttacaaatcggagacgagctcgaggttcatcaggatttattagacgataccgaccatgctcttgaccgaactaccgttcgtcttgacagagcccgaagacagctcgacggatttgctgggaaggccaaagagaatggtgggtcctgctcttgtcttgtgtgatattgactgccagtcaggctgatttgctgttcgttgaacgggatggatctgatggtgtagcttcggcagtgacgatcgtgatactcattgttctgctagctatcttaattctggtattcaaaacttgatctcaagatagagagagaaagacgtatacctttatgatcggagagatataaacagaacttcgacattgtaaatttatcctgctatacctattgctgtataaaatcacgaccttgctatgcatgactgttccattgcacgatggcttagacatttatgctcttgtatttttatgcacactgatcgggagtctgaggatagaccatgctgaggctagatggtctgttgtttggaaagcgcttgttgccgaaagttggaattatgtcattttcgtatcttgagtggatgcccagtcatcagattctatcaacgacagctatcgaagcctttacagacatttacaccaagtatcaatagagatccacgacatcatatacccaatggaatccaagttgactacagacaactgtctgcttctagatggatatgttctcaaagtgagtattgggttgtgtcatgatgggtctctaggatctcatcttggatctggtacgctttcgctgataacggtaaccttcatttgtgatccccacatcgttattctctacaacctagacaccttttgagcttctccggaggtcattcaaaacatctcaacgaaatgttgagaaggattatggatttcttcttcagttgatccaacaacttcggcaagtcaccaaggaggactcgtcgtcattggcagaggtgaaggaggacctagtggtcaagcttgaaacgggtatagaaagagccaagggtttgaaacgcaaggtgtgttcatctcatattttatcgctatgggcaaggagcaaccgtaacgatgcagattgaaccagatatctgaaccccacatatgaatcttgaccctgtgggagtcagttagcggacctactgccatcaccttcaaacccaactctgcttcgacctaggttagatcatatctccaaagtagagacattcgcctcgccgaatgaagatcagttcaagatgtgagctcttctttctcttgagtcgtgtcgtttgtctctgaagaacaggaagctcaaaagaacctgttctgcgtgatcatgcgttgtcttttagatgggacgatcaacgttacatgcgatatgtcattgattatcttcttcgaactggaaagctagagtctgctcgggagctagccaaatcgacccatcttgaggtcagtctccttatatcatatctgtctgtttatctcatttgatgataactgacttctgttttcaggcgttggtcgatctcgacttgtttcaagaattggcccatgttgaccaggctcttcaatcaagatcttgctcagaggctttggtctgggccggagagaatcgaggggctctcaaaagagccaatgttagtcttcgttgtcccttatagtctttgcggtttgccgctttatcatgaacatcgagtatgctgacatagagctctccaatggtatcagaacccgctcgaatcttcgcttcgtctgcaggaatatatcgagctctgtcgaaagagggatctcgttcaagcgctcgcttactacagaaaatatctcagtatttggtacgaaactccagaagttcgaagggctgcaggtctcttggcatttgacgaacaaatcgcgagaaaagtagggatgtacgctgtgagtagccttgtaaaactatcttcagattcactagttgagctacagggaagtcagatctgagctgatatcgaacattgaccatcgaatagtccatgtatcatatcagtagatgggatactctccgtgataaatttcgatcgacattcatcgatgtctatgcacttccggctgtctccccattcatcacttcccttcttgccgggcttgctgccttcaagcttccagcttgtagcccagatattccttatctgttgctaccagcttctactaagccacctttcggttcactcccaacctcgaccactgactcgagttcggtaggagaccaaggcggtggaagggcgagatatcagatcgagttgggccaaacactcacgtttaatccatggccgagcagcggagaaccctcttctgggctaccgtcatcttataatttaccggctcttggtccacccactggtcttcccagctcgcacctttcgacaagtatcagcggaccggcgacactctctttctcttcttctttatcccctttctctgatttcactgctactggaggattaacaacaatactggatcacccagtaggacgagcaggcaacccgtcatgtccgacatgcgattcacatttgggagctatcgcgaaagacctcccaggaagccataacgaaaactcagtcttggtctgtcggatttcagggagagtgatggatggatcggccgagggaagtccagtcacgtttcctaatggatacgtttattctttcggagtcagtctcggtttcttttactcttcatggcaatcctcgaaggcgcaattactgccatcttgctctcattttctgctttgtttgtctaatcttgaatctgatctatatatccacactttttcctcaggccatgcaagagatggcaaacaagaacaatgggatcgtgacctgtccgcgatcaggctactcttgttcgatctctgaactcaagaaagtgtttgttctttgaatgggtttgggttctgttttctttcttttcttttttcaagttgtatcagtgtgaacccggagttatacaggctcaatgaatttatcttctcatcatacgtcccgccatctgtaattatctatctacgtgtatgtgcattgcatatcatgtcagtgtaagtgtgctcgtcattgttcatgatctctgtcaaagaaccagaacgcgtttgagcagagcaagaaacaaagtacaaaggcttgagcatcagatatcgtttgaaagcgtaggtaacatattatatgaacagaatggctcaagaagaataagagtggtagacacagacggatacagtgtacaggagttcaacgggcaacttcagcttgggcaggagtagcagactataacgataaaataagacaattcatcagtgatatgagcagagcatccaggcgaacagaaagaaggagaatggaggcttacttcaggaacaggatcagcgtcgacaaagtcaggtagcgtattggtgttctgaagataactaggaagtgcgccttcagattcttcttctgcgtagccttcatcggctaaagcatcgagttctgtttttaaaagaagaaaggtgagtgaaagtttgaaataacggcataggcgcacaaatgctttgtttatattatcgtcaaaaggccagaaaggttgaaagtggaaagactcaccagcttgaagatcggattcatcaatctcatctggaactccataacttctccctagtgattcctggatctcatttgcctggtctattaggtcttccatgtcatagtgaatgctctgtttgacagcaggaacgaagtaagtacgaagaattggcatgggaatggcaagaaggcgaaggagaggcatacctcaatcttatcaatgttgatgttcttatattgtttcttcatctccttgttagctctttgcatagcgtccactgtagccatctttgggtgagtgtgcgggtatggtcagcccgaagagcggagaagaacaacgtgagcgcacaatgcaagaatatgtgatgaagaaggaaggacggacggtgttgcgcaggttgtctgtcgtcatgctagcttgctccatgttgaacgtctgttgttgaagttgttggagttgaccttcgtacatccgtttttgtttcaatacaccgatggctcttttttgaattgcaccctgtgaatcatcgcgcgcacacgtacacatatgtacccgggttggatgtatgttccacgagtcagaacagttgccaagaaacgactacacgaaaattctcacctttcctggtccctctctcattttggccatttggtctctatatcgcgtaagctctgcgtcgagtttcctgactttgacttcaatcgtacctatcctggtgtcggtcttacgggtggaacacagagagctaacgatcagttatgatgtatgaatgagatccgatggaccaaggacgtttgattcaccgaggcaatagcatccgatagattcggcttgggtgttgccttcgagtttccaaagaacctgttcatgatgtgtatgcgaacgatgtatgatggttagagacgagatggtggccgagtgtagattgtagacgaatgatgaacgtagtgggatatatgaaataattcaaaattacttaggtagtgttacctaacatgtcggccagctcctacccaacactcccacctttacactcgacttctcttccttctctttcttccatcagctcttcacgatgggtcagtcagaccgtctttgttcgagacgccagacttggactagacccaagctgatggcatctaatctctcaacgtgaatttctttatataactatgtttaggacataattcggataagctttacgtcaccgtccgttccctctttcatttcacttcttgttctcttttgatcacttcagagcacatgaagttatcaacttgtctttgaaggagatcagcccagctgaataaagaacatctgtatgcaaacactatgattttgatgccaacagcatagtgaacacgccgccggatctcacaccgcaggaggaggaggataccaaggcgtcaagaagcagaccgagttccaagctcgtcagtctttcttgcagatgaatctcatttccttgacccttcaattgattgaggctgatcactgtcatcttctctctgactgtatctcgttgtggttctgttattttattcgacagtcccatttgactgttgcgcactcagcttgacggcctttcaagtcccagtagctgttaaggaggaggatggaacagccaacgtgtaaatgattctgctcttaggctaatcagacttcaacttcaacaggagaaatccatttgcatccaaacttactttagttccatattcgtttgtctcacagattcgacctggtcaacatcctgccgtatatcaaaaaattcggaaccagtctgttctcctccaacgtttctactccttcattattcatacttatatcaaacatcttccgttttcaatctctccaaattatcagacccagtcacaggtcgtcccctcacaacagcttcattgatcaagctccacttcttcaagaatgacacggccgaaaataagtcgtattcggatccagtcacttttaaaccctttaccccgcatacccatattgtattcgtcgcgacaacgggcaatgtgttttcgtacgagtcggtcgatagactctgcatcaagaccaaggcttggcgggatctcattaccgacgagaagtttaccagagcagacatcgttaccatccaggttagcttcgatccacatcttggcccgcgtcatccctggtccaatctgattagcattggctgcttgttatatggaaatttcttcaggatcctcacaacctgtccaaccgagatctctcaaaatttgactatgttgccaacaaaaaatcggccggtgagaaagaagctgaccgcttgtcaggaatcaatgtcaatgctagtggatctgctgccaaaattttgcaacagattgcgcagaaagtatgtttattgaacagtcgtcgtacttctcgacacacccatttcgaggataggcctgatgtctgacatcttccattctttcatgcatatagaatactcccgctcctccttctgaggagactcaacctccgtcttcggagtctgcagcacccaaagaaaagaaggtgggaattgttgcgcccaagccggtgaaccaacgagcttgttcgtgcctatcctatattttctctgacaagatctggaaccgagattgaacccttacatatcatcttatctctttattcactgcttagataacgcggcaagctactcgactggtttggcagctgcctctctcacgtcgactgctgctgatattgaaacccgaggtgatcgagctctcatcgatgaagaagaatgtatgtttaggatttcctttctatctgtttaattcgttaaatcacacaaagttacgtgcgttctgaaacttctcgtatatccttgtgtgtgagatagttatgtttgatgagatctcatcattagtcaaggaaaaggatcgggcaaaacgaaaggcatatctgaaagtcaatacgaactttggggcattgaatttagaattgcattgtgacaaggtaggagccctctctttcttgttatacttccttcaagctcttcttcgactcatcatgatgtcttgatttatgctaccaggctcctaaaacgtgttacaatttcataatgcttgccaaagaaggcaaatatgatgggtatgaagctgccttgttccatccctggtcaacacaaaagtggacctaagctgacggaatgatcttttgattattcaactctctgctcaatacagagttatcttccaccgaaacattcctggattcatgtacgttctcccgtctcttttcttcctcaaggagttcatgtgaggcagtcgaaacacaaactcacacttctacccattcatgtcgttgacctcatttaggattcaaggaggagatccaacagggaagggcacagggggaaattctttctggtatgtttcagctaactatgtcttctaaacgatcgttgacaattgcacgaagatgattgtcatctttgttgcactggggatggctgatattctctttgtatgatacaatataggggtcataatttccgagatgaatacgatcttaaaggcgctttgaagcatacagaacgaggaacgttgagcatggccaaccacggagctggcacaaacgggtacggtgtgtttcttcgtctgcacatatgtttcaacatacgctgactgctgcttgcgactaccttgcggttttcttgatgttgcgcatacaggagtcaatttttcttgacctaccgcccaacatcccacctcggtaagtttacatgccaacatagttctatgaatatacttgctaacctctcaattccccttcatcgttgtatgaatatgacagatggcaagcatactgtgttcgggaatattgtgggtggaatggatgtcctgaatgtcttggaaaaagtgccagtcaacccagctacagatcggccgacaagagaaatcaaaatcataaatgttgagatgtacgtagatcctcctgctctgttcagaacacttttctgatatcttccaccgtcatgtatcactttccttgggggtttcctccttcaaacattagatttcaggatccctatgcccaataccagacccgacttgccaataagctggctgctcaatctcaatcagccttgtcagataagaaccgagaaaagactcgtctcgaaagagaatccgatcgaacgtcttggttcggggaggaccttgatcggaagaaggcagacaaagcagagattgacaggaagcgaaaggcaggtgttacggaggatgacttattggccggatcgattggagtcggaaagtacctggcagaggcaagaaacaagaagatcaacacggcagcgcctggcggagcagggacattgtccagcagttcaacgttcggaggtggtggagtggcaaagaagaggaaacctgctggtggagggtttggagatttttcatcctggtagtctccttagttctcaaagtttatttgccatcattcatgtctacttcgagggacacaagagatgatgtttggtcataatatgatgtatatataaagtgtagggtttggtatatgatacagtcttagaatccccctttgctcctatccccaccccatttctccgtcagatctggtcaagcgtatgatccttcaccggttcatccacctctattgcgatctagcacatcctgtccgatcacgatcgtattacgcacaggcgcatcgttgatccacaagactctcgaaagatcctcttcctgacttagtatcgactgggaagacagattcttgatccgtctagcaattgcttctgatacagcggccgcttgtgattgagccgttcgtttcttatcctgttctatcgaaccacttcctcggtcgctcggttttgggatatcctcgccaccactgacaccctcaggatctaaaagaacctcgaccagcaaacttctcgaccctccttcattcgcctcggcttgaatctctaaaagctttttctccaacgctagaccattcaccatctttcgcccttcaggtagaaagatagctacttcgccctccagtaacgactcatcctcttcctcgccctcgcccaaagaagatggctgaatgatctgttcaccacctgctggatcccagatgatgattcctgaagcaccggccgctttggcattcagcaccttttgaagaaatgtgcatcctccacgacggacaagcaatagatgagcgtcctcgatctgcgacacaattggagagcatagatcaagattcaacggataagaggaagccaggtgtataggcagaggaggtgagcatatattgaatttggtgggctggatccgctcaggatccgtcgtgtcagagaagataaaagaagatgatagacaagggctgatgagtccgccaaatgtggcggcgccacctcgggccacaccgacagcttctttctgggatcgattcgaaatgtagaacttgagttgaacagtaggattcctttctatttgaagagcattggagaaagattgtccttggccgaaaagtgagttctgacgattaagcgcaagctcttccgcagcttgatcgatttgtttttgattatcatcgtagtgtttgttaagattgatgtcggttataaacaactgtgaaaccgccaaacgagtcaagttccaagacgcatcgttagatgagataaagattgtcaagaagtgtatgatggcaagagctgaaatgatgatgagaataccttctcgcctgacttgactcgatgatgcccaatcttggttacatcatagccttttccgtccagcctctttgttacttgagctcgaacgcctgttgtgtttctcagaatccatccctgatcatttttgaaaagtttttccgaatttggcctgagaagaagcaaggaagataactcaattgatactggcacctcgcgaaatatcgctgaaaccacacttactgaagatcctcttcgttgctcgatcccatatctgccgtgaataacacatcaatcatatacggctcttctttgggagtctcgcacatcaaatgagggttccagaacgggagatcttgtcttcgaatggctcgattgatcgtcaatccggcgagatgacgtgcaaaatcgtagtctgacctcctgcaacgtttttaaacaaagtgagaaatgtgggttttctttgattaccgagtacccagctgataaacaggaatcttatcgtaccctttgataccacccaatagtccgatcccatagtcatcggctctctcccgcttggaattgatggaataaggattgtaaagcaagcgcggagaccgatataccggacatgtcgactcaggatgagaaagccgagatcgctttgtatccgttttttcgttcaaccttataggtcttaatcaagagttggtcagattaaaattcaaaaagttgacagttaatttattggtttgttaaaatcgcatacacacaaaacgaaacatcactctgcggaagaacgacttacggaagaagtcgagaagcatcgagatataaaagatgtccttcggtggtgaacaccatgttagaatgatccttactatcaacatcaaatagaggtggaatcgtcagagcccctcatgctttgggtgatgtgctgactcgatgaacttacttgacaaaattatcctcatcgaacagcaagtagaggtactgctcgtgtcatgagcgcaaacttcagtttaattcattattccaagagaaatcccgggtaaagatcaaggagtaatgagagcaataaacaccttgatagtctcggatagcgcaaagctctccattcgatcggttaattcacccgtgatcaggttcttgactgatgcgattccacaccttacttttgccttgctgatcaaatcattaaggattctctcgccaatttctagatagagttcgtctttcgtcgcctagttgtttatagatagacactgttaatacacgatttgctctcagaataagatcgacgatcggctcactcggtagagaaagtaattgctctcgacaaactcttattgatggacgattgataatagttaagtcataataccgtttaactgatcacaagtgagacagttgtctatgaagaaggatgcactgaccaggtcgaatgggatagcccaaatcatccgctttcttttctactacattaaagctttcaggtattccaccatatcgcctccataaattccaatctatatttgtagatgacaggatatataggtgaactattgtgggtacaactgagagcgtggctggagaaacaaaacttacaggctagatgtgatttgattgccttggtttagagatagcaccggcatcgaattggaaaggaaagtaagcgctgttgttgatataagagttgactatcaaagaacgaaccccgtttagatcacctgccaagacttgcagccccggaaagaaggcagctagcgagctttaacaaatagaacatggcagagggtcgtatgaggttctcatcgatagtgtaatatgcctgaaagaggcgagagcttactctacagtcaacccgatccgttcgcctgtatgcatagaaacgcctctgaactattatccagatgtagtcaaatttctggaagtcagaaggcaagctcttcagagattcgaagtgttataggaatggatcgaagacaaaaagcgtacccagaacccctcttcgccccttacataacgcattatcgctcctgttttaccgcagtgcaacgaatttgatcagctgttataatccggttggtatcaaacacgaagtttgcggaccatatgattcttcgaacacatctaagtagctttgttctccaagcagaatccacgctttgagcgcgtactcgaagaaggaatccgttccagctccgatgtgtgatattaacggagggatccattcctgacatcagccggaaaacagttatcttcagagtggaactttcaagcgcaagcaatatgtagagattgcgcctaccaggcttccaacatcgataccattccccaagagtccaacttcggaccgacgttcccaaattgtgaagaacgcttttttcgcctgcgtttcgtatctaggatcgccagtcagtctcgaaagagtggcaaactctagaatcaaagactgtgaattgaagcgcaagcaagtataagctcgcgtgcctgtctgtctcagtgatgggttttttttgttggtattgagagcatgagacgaaccccagcaccagctgtacatgtagctgtcgtctcgcctttaacaacacctttcttcagattcacctaatacaacggcgcgggacgagaacagagctatcagtccatgcgcaagcgcaaaacataggcaacgcccctcttctaaagctaccttcagaaagaaaaatgcaaaacaaaccctagcaaacggtaaatcgccccacatgttttccttccctcttccttttcctacgctgaaacctgtaccacttctttcccaggctttgaccaatctatctcccaaatcaactgccatatctaataactctcccttgtaccagtcgagtttgaagtcttcgtcttgtgctctgtctacagaactatggtgtttgggtaaagggatgtctcccgacgcgaattgatgcgccgatagtagagagccaaggattcgaattgtgctttcgaagacttgtatcttattcgatttgtcaaacgagacagtttggatgatcgtccggactctattgacatcaaagatatcagagacgtacagatcatcgatacatacaaagaaagattaagacaaacccttgttcaaaagcagtgcgatttcccatgatagccagtgtatcgatgactataacgtcttaaaagcatgatgagtatatggtcttgatcccatttgacctttcgaaaacgcctggatgagttgaaacagaccatcgacaagtgttaaactgtaatctccacaaacatcgttgaaagctccgtttgctctggaaaacagatatataccgtggtcagctagagccctagatgaacccttgttacataccagaatgaagagaaaaggacgatagcgtgattttcgaggtgaacgacttacggatcagccgcgttcggacctcgtcctttacatgataatggcttcaactcatcctgatgtcatctcgagcccagagtttacgcaaacggacataaaccacgtcagacatgatgcaccttatgatttttggactaaccgatcttgtcgttgggatgagatgagagaaacgcgtacgtacgaacggaaacccgtgatcgaggtagttgtaatatccatggttgaataactcccttgttcgttccctaagctgtatctttttgtccgaagtgaatatggagatacttgcagttggtgtaagcaaaagaaggactgtgtacacccagcctgcgagatgaaccatctgaaagatgtgaggtgttagtcaactaatgcacaatgtatgaaatctacctgctgagattgaacgtagaacttataaggttgatgatgagacgacaagacggctagggttaatttcggggttcgatcatagtcacgtgtcgacacagctttcactttgtgttctatactcctctatataacatcacacaaacttcattgataaagaaacgaaagaccgagaacgaaatagtacagttgatgaattcactactacaacccgataaagtagcaagtgaatagagaggaatagaaaatgacatagggcgtaacgatatccgagaagcctgatactcttacaacttggcctttgctcctgccttcagcgtcacagcggcagcagccagagcaggggtattgcgctccttgaccttggtagtgaagatgacctttggtccttctctccacatctcagtcaccaaggtctctccagggtagacaactccggcaaatcgaactttgatgtcgtcatattccccaaagttttggagcacatgctttcccgcgattcccatagagcatagtccgtgaagaataggcttctcgaaacctcctatggatgagaacgaggggtccaaatggagaggattcaaatctcctgacattctgtaccaagcagcctgtcgctccaaaaccttttcctcgaccactgcgtcgggctttcggctaggaggcttgttcgcagcactggctgctcccctatcgcttcctttctttctgccgttgaagtttccgacacctctcaagacgacggttccttgggtctcaaagaccttctttccagtcgccttgtcaacaacatctacaccgctagtgacagatgctgattttccctgtgaaccctcaacctcgatcagttatcagatctaacatatacatgtctacatgataagcagatcactaactttatccaggacctctataagtcggggctgacagaccaaggtagcgctggtcggaatttttccatgaatcttgaggtactgttctccatgaagaagtttggcctggtgatagacgagacaaattcaggttaattaggagacgtatttctgcgttgaagcagagtggaacgaggcagcgtacaggattgaagtttggaagccaatcgaagccaagggttgatccagcattgaatccagggatcactccaaacgtaggcaaagcctaagcaacaggagagtgaaaaccgagtgatattcagaagtcacgttataatcagatcatgaaagattgaaaaaagagcatacggcaaaatctccatcctgctcatatacccatttgagatccttctctgtcgctccaatccccatgttgtagatgatgacgtctcgttcagaatacgaatactcgtcaggatcgaccgttctggatttggcctccttgacgatctccggatcctcatcgtcatcaccggccgaagcgctacctttgtttccgaaattctccattacctgaagaacagaaagcaagaacaaccaggttgttaggtggtatcatggcatgaaaggcagattgtgggtgattctgacctgttggaaaccttcctgcgtggaagaaggatgggtacttcttccgtcattgaagtcggtaatcttcttccattgggaaacgatctgatcagcagtgagcggcctgtcattagggaatccatactgtgagttcccgccgcaatacagaagacaagtagttagctctatctatatatctgcattgaacaaccaaacaaagtacgtactccaccagaccgctcccatcggacttgagaagcccacccaccagaaacttcaaaaagatctccggtggtctcacaatcatccgaagcgaggtagccaaccaaaggggccacgaagtcaggcttgaatgcatcgaccatctccttagtccaaatctaggtttaaattaatacagtttggaacaaaattgagcaaaacatccggtggatatagatggcatacgcaagaatacaaacagtctcagtcatggcggtaccggcgctgggagcgatacagttggcaaggatattgtacttggctccctcgatagcaagggtgcgggtaaatcctaagatagcagccttggcagtagagtaattcgctagagaacaatccgaacaagcgggtcaatatacattccaagagagaagccttgaagcatttcaaaaggtcacaccttgtccgaagtttccaactgagaataatgaaaagaacaccggaaggctcatttcagtgatggttcagtgaatagttgtttgcaagattggactcacagataccaacccccgagcaagtagtcacaattcgtccacccttctgagcctgcatgagatcccagacagccttgcagcatttgaatgtacccttgagatgcactgcgattacctggtcccaatcagactcggacatggccaggaaagatttgtctcgaaggattccggcgttagcgatgagcacatcgactctcttgttcgtattccaaggggcggagagtgcagttttgataatcgcatctccatcttctgcagaagcaacagctggaacggcttttcctccggctgtttgtattagaatagaaaatacacagtcatctgtcagagatattgtattgcttttatcgaacgttgacatgaacaactgaccctggatgatttcgtcacaaacagatttcgctcccttctcgctgacatcgttgaccacaaccccggctccaagcttagcaaacatcaaagcataggctcgtccgagaccagctccagctccagtgatgacgacaaccttgttgtagaactcaaccttggggtcagactgagcattagggggaagactagaggctttttggagggtagcctatcatttgtgatttgagtaaaaaggtaatatcagagatacagatgatggtgaggaaaatgtaaagatagagagaagaagggaaaacaggtttctcacaatcatatccctgtcagtcatagactctgggtgctcggctttatcgaagtttcggatgtcagcaaatcggtgcttgacctgataggaagaacatttgtattaataaaacctgcaagtcgagaacttgatgtcataaaaacagagattgcttacggcactaggagtgaaggtatcatctgttctgaagattactccctgactctcctcccaacggacctctgcgacaaagccggctccgacctcaaaaatccttccagacacaggtggagatccctgttgatccatacacgacggaagaagatgagcttacgaatctcacggataccattgatcataagttgatggacttgcgttatctttagagcaaagcaccccaacaagaggagcaataaattcgggattgagagccttgagcatatcaggaggcataacctatatatatgtaatgtacatcagctaagacacgttttttgttgcagatttgacaaatagacccacagtcgcgagcatctgggtagcagccatctgttgtatctcgtcaagaacgatataggagtcaatctcacataatcgatgagctacaagggcatggagaaagcagacgaacaggagcgatgacgttgacggcaataccgtacttagcaccttcccgagccagagtttttgtgaaggagaccaaacccactatgttgttaaacaaaacctttgttagctcatcttcagtgtggctttcagattgacagatacaactcactcttggcagccgaatagttggcctgtcccatgttaccgtacaagcctgataagacccaagggcgtatcagtgcatgttgatagatatatgtccgcagaaaagaggaacagacctgctgccgaagtagtattaaggatccttccgtactgtaaacaaagtcaccaagatcgaatgagtaacatatttcgacgaatattgagagtacaaaaaaatctaaccttttggcctctcatgatcggccaaacggctttgctcatgacaaatgctcccttgagatgaacaagcatcaccaggtcccattcctgtacatagagattgtagagtgataatgtaagagcatgtacttttctctctttttagaaaagacagaagagaactaggaccgcaaacccgacgtacctgatcggtcatcttcttaaaggacttgtcccctgctctcaattgaagagattgatatcaggtcatcttccttgtgctcttttaaactcttcaatcggcgatacacgtacggataataccagcattgttgaggaggacatcaattcttcctccaaatgcctttttagcatcctcaacgatcagatgcccgtcggtgaccgaatgaacggaaggtgcagcctttccgccggctgaagtcaggagttttccaaacgtctcacggtcagttcatgcgtcctttccatcctaataaacaagtcagagctgacctttgatgatctcgttgcagacttgttcggctgattctcgactgacgtcgttaactaccacctttgcgcctaagctcgcaaagtacaacgcatatcttcaagccagagatagtcatgatggatgcattttttttgagtgaaagattcaaacgattcaagaagcatcttacttagcatccgatcatattctagggagatcctaagatgtcatcggcatataaagacgtcgactgaagagatgatacaaagttggaagtacttacactttgccgatccctgtacccgctccagttacaataacgacctgatcctgatagttgatgttgggcatatctgttaggatgcagtgtttggatatatatggttcttcaaaatgatgtgtgaattcaaacaaaggagatctaagactatggtagagattggatcagagttgtgtggaagatagatggtgtttggagtagaaagaggattgctcgcgagatgagaaacccggtcggttactcgacagaaccggatgaaccggatagatcgttaccgaaacataggccggtcagcggcgtgtgtctcttgatgtttagtcagtaggtcgatccaacgctctgggatgagtacgattcctttctgtttcttgtactctgtgatctgcgttctgtgtcctgtagtctgtactatgtgctctgcgatctgtgttgtgtcttgtgtatcatgtacatcctcgtcctttctcgcgctttccttttgctcctcatggcttgttgtgtctgtagatgactctgtctgtagcgatggtatggctttgtccgtcgtcgtcgtcgtcgtcttcgacatcgtcatgtttgccactacctgccactacctgccactacctgccactacctgccacccataccgccatcattgccaccaccaccgctgtgatcgctgtgttgtcttgcagagagctttgggacatgatctgacctacgagctagcagggacagaaaccacactcaaaaaccaagcgattctgttactggctgtgtaaccactaccccaccacgtggtctcagcctcataatggttacagggctaggctctgtccccacacccgatcttcctcccagaaagccgcgggatagaagcgaccggtaaaagtgaaagaaagcaaaagtatcacctgggagactgtggattggttgcaatcggaaacgtcaaggtgatctaacactctaatcgtccatcgtccttccaaccttcttttcaatactcgtcctcctcgtcgcttcgggagtagtcgagaggatgatccactctcctacgccatctagactagctccggcatcgatcatctcaagatctagctcgtcttcaacattatctgacttttcgggcattcatcctcctccggttcgatcgtctagtatccctctcgctccgaatcagaacccaccgctattctctttcgcgccttcttctccccatctggtcgggacaactagcaatcgtccctcaagactgtctgtagatctatccaatctttcttcgggttcatccgatccttcagcttttactcaaggcagatcaagcgatatcaatctgagccccacggcttctcggtccaactcgccagtcaacagattctctcttatcaaccagccttcggtctcatcattctcacaaaattctcatcaagcctctcatccatcccagctgagacatttttacgtcccctcgataacatcgacaaacccatcttccgggtctccatcgattcagacatcttctctaaacttagcatctggttctgacgcctcagctcctcctttatcctccaatgctcggcacgctcgtccaggcttcatctcacaccactcacatctggtgatagcacctcatgggtcttctcccgagatgtcttatggaagatggatcatcgaaaactttcgagatcaccaaaatggaggttggatgattccaccaggattgacgccttatgtaccgtttgcatgctgggcagcaactagtttaggattcctaatgggcttcacattttggcgggccgagctattttcaggtgggttaatcatagtgtctaaagagttctcatacgaaagcttacccggttcgagcatattactagcattggataacctatccaatgcccttgtagaacaaggcatccttggccaattcatcatgggtaacaatctttcttctcttgtttatcgctcccttcgtgatgatttactgacccacctatgagcctatacccatacaggattcttaatcttcctaaccaccttccctccggtcccactgtactcaacactaatcattcttagtggctatggcttcggtgcatggacggggtttattatcagctacaccgcagcgctggtggtcagttcttattttaagttgtgatccgttccatcagctctgatttcatcaatttaatcactttctcttgcgacaatacacttcctccttcttcagggcgccttggttgtcttcctgctatcaagattcttgttccgagcgtccatgatcagactgttagtcttccaagacatttattctttctttcgcgtttgttagctaacgacgctatgcgctttctctacatccactctagcctttctcgttcaccgtcactagcccgagtgattcacgcgatcgaacgaaagccatcacttcttttcctcatcagactagcgccatatccttacaacctgctgaacactctgctagctagtagtcggacgcttactttaaaaaagtacacgaccataacggcgatcagtttaggaaaactcatgtcagtcttctgttatatgttcactcaagaatgccgttctcatctatccttcgtttgccattgggctcttttcatcacacatcacgacccgatcgatcagtatacacacgaccgtgggttctactatccataactggggcgactatcactcagacaccggactgtccgactcgatagaagggagtgagcaggacaagatcagcccggaagaatgggatctgatgaagcagaatgaaaagagaggggaaactctgaggaaagcttggtccatcataggcatcatgttcgtccctcccagttttcttcaagatccatctttcttcttatcagtcggaggaaaaccctaaatttgtgtcgttccacacatttgtttgtcagcttgtgtatcgccttgtttgtctatctgactcatgtcgcccggcgagctgtgaacgatcaaacgatcaccaccggatccgcgccctcctcccgatcatcttcgccagtagacacccgctaccgaacccataacggtggatatcagaacattcctgtccatgatcgcttcacgagctcacacacccttcgttcggagagtgattcaccgacggagatgcccgagacgacgagactttccggaacagagtctggatcgaggtcaactgtcggaacaggcaggagggagcccaaagataaggtcaggataggaagtgtcggtgggatggaggatctaatcgggtttgatctaagaggttcggaaaagactagactatgagtccatctaccatgtgtgcttgcttattggtcttctctctctctctcttttctcacatctctcaaaatgttcttggtcttctatcgtgacctttctgtctgcttgtccctcgcttttatgttgttctctgaattcacttccaacactctttgtcaaagtaggggtatcttcctaccttctgttcttggatctttctttatatcgttgccttcgaacgttgtattatcattttctgtatttagttgctgttgctatatattacctcgacttggcttcgctatcagtgagattgattctctcttgacctctcatctgctgaaacacgtgctcgtttcgtttgttagactcgctcatttgctgcttcggtcaagcgtggcaacacaacacgtaagctgtgcaaacgtaaccaattttgttactgacccagccgcctttcctcatggccggcaatcgtcccccgaaaggattcgacaactaaactgtctgaaacctacccaaaggaaaaaaaaaacctatcctcattcatcggacggggcaagagagcgagattacgagagaaacgatcgaagaagaagtcaaaagaaggcctagaagggctggcggtcaacgaaaccatcgtcagaaagacaaatcaggtcctccggtctactac
